United States Patent Application Publication US 2008/0113351 A1 - sequence listing, part 33

SEQ ID NO: 810623 - DNA, 19 bp, Mus musculus
  siRNA target sequence for Akap9 (NM_194462.1,11323-11341).
ggtactccaggagacttaa

SEQ ID NO: 810624 - DNA, 19 bp, Mus musculus
  siRNA target sequence for Akap9 (NM_194462.1,11324-11342).
gtactccaggagacttaaa

SEQ ID NO: 810625 - DNA, 19 bp, Mus musculus
  siRNA target sequence for Akap9 (NM_194462.1,11330-11348).
caggagacttaaattctat

SEQ ID NO: 810626 - DNA, 19 bp, Mus musculus
  siRNA target sequence for Akap9 (NM_194462.1,11363-11381).
ctcaacttcaccagtacaa

SEQ ID NO: 810627 - DNA, 19 bp, Mus musculus
  siRNA target sequence for Akap9 (NM_194462.1,11374-11392).
cagtacaatcctgataaat

SEQ ID NO: 810628 - DNA, 19 bp, Mus musculus
  siRNA target sequence for Akap9 (NM_194462.1,11432-11450).
ggcgacttggagctataca

SEQ ID NO: 810629 - DNA, 19 bp, Mus musculus
  siRNA target sequence for Akap9 (NM_194462.1,11434-11452).
cgacttggagctatacagt

SEQ ID NO: 810630 - DNA, 19 bp, Mus musculus
  siRNA target sequence for Akap9 (NM_194462.1,11459-11477).
ccactactcaatttcactt

SEQ ID NO: 810631 - DNA, 19 bp, Mus musculus
  siRNA target sequence for 1110014J05Rik (NM_197940.1,206-224).
cacctcccacatttaatca

SEQ ID NO: 810632 - DNA, 19 bp, Mus musculus
  siRNA target sequence for 1110014J05Rik (NM_197940.1,296-314).
gcaaagggaccaaactaaa

SEQ ID NO: 810633 - DNA, 19 bp, Mus musculus
  siRNA target sequence for 1110014J05Rik (NM_197940.1,315-333).
gaaggtgaccaacgttaat

SEQ ID NO: 810634 - DNA, 19 bp, Mus musculus
  siRNA target sequence for 1110014J05Rik (NM_197940.1,318-336).
ggtgaccaacgttaatgat

SEQ ID NO: 810635 - DNA, 19 bp, Mus musculus
  siRNA target sequence for 1110014J05Rik (NM_197940.1,556-574).
gggcgtcctcacgatgata

SEQ ID NO: 810636 - DNA, 19 bp, Mus musculus
  siRNA target sequence for 1110014J05Rik (NM_197940.1,558-576).
gcgtcctcacgatgataca

SEQ ID NO: 810637 - DNA, 19 bp, Mus musculus
  siRNA target sequence for 1110014J05Rik (NM_197940.1,560-578).
gtcctcacgatgatacaga

SEQ ID NO: 810638 - DNA, 19 bp, Mus musculus
  siRNA target sequence for 1110014J05Rik (NM_197940.1,860-878).
ctccttcccctgtgaacat

SEQ ID NO: 810639 - DNA, 19 bp, Mus musculus
  siRNA target sequence for 1110014J05Rik (NM_197940.1,862-880).
ccttcccctgtgaacatca

SEQ ID NO: 810640 - DNA, 19 bp, Mus musculus
  siRNA target sequence for 1110014J05Rik (NM_197940.1,996-1014).
gagacacaattctttgcat

SEQ ID NO: 810641 - DNA, 19 bp, Mus musculus
  siRNA target sequence for 1110014J05Rik (NM_197940.1,1070-1088).
ccccctccttgttgagtaa

SEQ ID NO: 810642 - DNA, 19 bp, Mus musculus
  siRNA target sequence for 1110014J05Rik (NM_197940.1,1149-1167).
gcccatgatccgaaatggt

SEQ ID NO: 810643 - DNA, 19 bp, Mus musculus
  siRNA target sequence for D630003G22Rik (NM_197943.1,279-297).
ggaaattcgtgcatgaaga

SEQ ID NO: 810644 - DNA, 19 bp, Mus musculus
  siRNA target sequence for D630003G22Rik (NM_197943.1,280-298).
gaaattcgtgcatgaagat

SEQ ID NO: 810645 - DNA, 19 bp, Mus musculus
  siRNA target sequence for D630003G22Rik (NM_197943.1,428-446).
cccgtggctgaagatatct

SEQ ID NO: 810646 - DNA, 19 bp, Mus musculus
  siRNA target sequence for D630003G22Rik (NM_197943.1,563-581).
caggccttgaaacacatat

SEQ ID NO: 810647 - DNA, 19 bp, Mus musculus
  siRNA target sequence for D630003G22Rik (NM_197943.1,719-737).
ggaccctgtgccttggaat

SEQ ID NO: 810648 - DNA, 19 bp, Mus musculus
  siRNA target sequence for D630003G22Rik (NM_197943.1,1068-1086).
ggactcccaaccaactcat

SEQ ID NO: 810649 - DNA, 19 bp, Mus musculus
  siRNA target sequence for D630003G22Rik (NM_197943.1,1071-1089).
ctcccaaccaactcatgaa

SEQ ID NO: 810650 - DNA, 19 bp, Mus musculus
  siRNA target sequence for D630003G22Rik (NM_197943.1,1384-1402).
cagcattcggtccattgat

SEQ ID NO: 810651 - DNA, 19 bp, Mus musculus
  siRNA target sequence for D630003G22Rik (NM_197943.1,1481-1499).
gctggcgacatgattgaga

SEQ ID NO: 810652 - DNA, 19 bp, Mus musculus
  siRNA target sequence for D630003G22Rik (NM_197943.1,1582-1600).
cagtagctccccatatgca

SEQ ID NO: 810653 - DNA, 19 bp, Mus musculus
  siRNA target sequence for D630003G22Rik (NM_197943.1,1659-1677).
gcatgaagaggcagattgt

SEQ ID NO: 810654 - DNA, 19 bp, Mus musculus
  siRNA target sequence for D630003G22Rik (NM_197943.1,1743-1761).
ctgcattggtgcatcacaa

SEQ ID NO: 810655 - DNA, 19 bp, Mus musculus
  siRNA target sequence for D630003G22Rik (NM_197943.1,1746-1764).
cattggtgcatcacaacat

SEQ ID NO: 810656 - DNA, 19 bp, Mus musculus
  siRNA target sequence for D630003G22Rik (NM_197943.1,1750-1768).
ggtgcatcacaacatcatt

SEQ ID NO: 810657 - DNA, 19 bp, Mus musculus
  siRNA target sequence for D630003G22Rik (NM_197943.1,1814-1832).
gtgtggagcaagtatcaga

SEQ ID NO: 810658 - DNA, 19 bp, Mus musculus
  siRNA target sequence for D630003G22Rik (NM_197943.1,1829-1847).
cagaaggacgaaaagaact

SEQ ID NO: 810659 - DNA, 19 bp, Mus musculus
  siRNA target sequence for D630003G22Rik (NM_197943.1,2069-2087).
gccacgctcaccaagttct

SEQ ID NO: 810660 - DNA, 19 bp, Mus musculus
  siRNA target sequence for D630003G22Rik (NM_197943.1,2523-2541).
ccgcagcctatactataga

SEQ ID NO: 810661 - DNA, 19 bp, Mus musculus
  siRNA target sequence for D630003G22Rik (NM_197943.1,2524-2542).
cgcagcctatactatagaa

SEQ ID NO: 810662 - DNA, 19 bp, Mus musculus
  siRNA target sequence for D630003G22Rik (NM_197943.1,2526-2544).
cagcctatactatagaatt

SEQ ID NO: 810663 - DNA, 19 bp, Mus musculus
  siRNA target sequence for D630003G22Rik (NM_197943.1,2548-2566).
ggacaccgtggccttaaat

SEQ ID NO: 810664 - DNA, 19 bp, Mus musculus
  siRNA target sequence for D630003G22Rik (NM_197943.1,2878-2896).
gctgatgcatcaaaatgga

SEQ ID NO: 810665 - DNA, 19 bp, Mus musculus
  siRNA target sequence for D630003G22Rik (NM_197943.1,2895-2913).
gagactatacccacttcta

SEQ ID NO: 810666 - DNA, 19 bp, Mus musculus
  siRNA target sequence for D630003G22Rik (NM_197943.1,2897-2915).
gactatacccacttctatt

SEQ ID NO: 810667 - DNA, 19 bp, Mus musculus
  siRNA target sequence for D630003G22Rik (NM_197943.1,2904-2922).
cccacttctatttctgtta

SEQ ID NO: 810668 - DNA, 19 bp, Mus musculus
  siRNA target sequence for D630003G22Rik (NM_197943.1,2905-2923).
ccacttctatttctgttat

SEQ ID NO: 810669 - DNA, 19 bp, Mus musculus
  siRNA target sequence for D630003G22Rik (NM_197943.1,3052-3070).
gaggcctacagagagatta

SEQ ID NO: 810670 - DNA, 19 bp, Mus musculus
  siRNA target sequence for D630003G22Rik (NM_197943.1,3095-3113).
ccgacatcatcaaattctt

SEQ ID NO: 810671 - DNA, 19 bp, Mus musculus
  siRNA target sequence for Hsh2 (NM_197944.1,277-295).
cacttcatggtgaaacttt

SEQ ID NO: 810672 - DNA, 19 bp, Mus musculus
  siRNA target sequence for Hsh2 (NM_197944.1,282-300).
catggtgaaactttcagaa

SEQ ID NO: 810673 - DNA, 19 bp, Mus musculus
  siRNA target sequence for Hsh2 (NM_197944.1,358-376).
gtcaccttccaccaacaaa

SEQ ID NO: 810674 - DNA, 19 bp, Mus musculus
  siRNA target sequence for Hsh2 (NM_197944.1,431-449).
cagcaaacgtggactatga

SEQ ID NO: 810675 - DNA, 19 bp, Mus musculus
  siRNA target sequence for Hsh2 (NM_197944.1,450-468).
ggatctcttcctatactca

SEQ ID NO: 810676 - DNA, 19 bp, Mus musculus
  siRNA target sequence for Hsh2 (NM_197944.1,602-620).
ccccaaaagcccttttcga

SEQ ID NO: 810677 - DNA, 19 bp, Mus musculus
  siRNA target sequence for Hsh2 (NM_197944.1,618-636).
cgaggattctggacagaaa

SEQ ID NO: 810678 - DNA, 19 bp, Mus musculus
  siRNA target sequence for Hsh2 (NM_197944.1,668-686).
ctagccagagggtgaaaca

SEQ ID NO: 810679 - DNA, 19 bp, Mus musculus
  siRNA target sequence for Hsh2 (NM_197944.1,763-781).
gtgactcgagcattcagtt

SEQ ID NO: 810680 - DNA, 19 bp, Mus musculus
  siRNA target sequence for Hsh2 (NM_197944.1,818-836).
ccaccacgtctcttcaaaa

SEQ ID NO: 810681 - DNA, 19 bp, Mus musculus
  siRNA target sequence for Hsh2 (NM_197944.1,999-1017).
gttgcctgaggaatacctt

SEQ ID NO: 810682 - DNA, 19 bp, Mus musculus
  siRNA target sequence for Prosapip1 (NM_197945.2,714-732).
gtgctcggagccactagtt

SEQ ID NO: 810683 - DNA, 19 bp, Mus musculus
  siRNA target sequence for Prosapip1 (NM_197945.2,757-775).
gtacccaagaactttcatt

SEQ ID NO: 810684 - DNA, 19 bp, Mus musculus
  siRNA target sequence for Prosapip1 (NM_197945.2,772-790).
cattccatgcagaacttgt

SEQ ID NO: 810685 - DNA, 19 bp, Mus musculus
  siRNA target sequence for Prosapip1 (NM_197945.2,1009-1027).
ggcaccgctggctatagta

SEQ ID NO: 810686 - DNA, 19 bp, Mus musculus
  siRNA target sequence for Prosapip1 (NM_197945.2,1011-1029).
caccgctggctatagtagt

SEQ ID NO: 810687 - DNA, 19 bp, Mus musculus
  siRNA target sequence for Prosapip1 (NM_197945.2,1546-1564).
cggatggaggaaactaagt

SEQ ID NO: 810688 - DNA, 19 bp, Mus musculus
  siRNA target sequence for Prosapip1 (NM_197945.2,1576-1594).
cagaaggccggtgagattt

SEQ ID NO: 810689 - DNA, 19 bp, Mus musculus
  siRNA target sequence for Prosapip1 (NM_197945.2,2245-2263).
cgcatcgagtccactgaaa

SEQ ID NO: 810690 - DNA, 19 bp, Mus musculus
  siRNA target sequence for Prosapip1 (NM_197945.2,2246-2264).
gcatcgagtccactgaaat

SEQ ID NO: 810691 - DNA, 19 bp, Mus musculus
  siRNA target sequence for 3000004C01Rik (NM_197959.1,226-244).
cgagcggatgctggtattt

SEQ ID NO: 810692 - DNA, 19 bp, Mus musculus
  siRNA target sequence for 3000004C01Rik (NM_197959.1,256-274).
gtgtgatgggggatttcct

SEQ ID NO: 810693 - DNA, 19 bp, Mus musculus
  siRNA target sequence for 3000004C01Rik (NM_197959.1,706-724).
ctcagccgagcagttactt

SEQ ID NO: 810694 - DNA, 19 bp, Mus musculus
  siRNA target sequence for 3000004C01Rik (NM_197959.1,1204-1222).
cagcgtggaccatcacatt

SEQ ID NO: 810695 - DNA, 19 bp, Mus musculus
  siRNA target sequence for 3000004C01Rik (NM_197959.1,1213-1231).
ccatcacattagccaatat

SEQ ID NO: 810696 - DNA, 19 bp, Mus musculus
  siRNA target sequence for 3000004C01Rik (NM_197959.1,1417-1435).
gtgccatgcaaagaatgaa

SEQ ID NO: 810697 - DNA, 19 bp, Mus musculus
  siRNA target sequence for 3000004C01Rik (NM_197959.1,1567-1585).
gtcccctagtccaagtgta

SEQ ID NO: 810698 - DNA, 19 bp, Mus musculus
  siRNA target sequence for 3000004C01Rik (NM_197959.1,1632-1650).
cggaccactccaaacagtt

SEQ ID NO: 810699 - DNA, 19 bp, Mus musculus
  siRNA target sequence for 3000004C01Rik (NM_197959.1,1668-1686).
gcctggcccagcgacaata

SEQ ID NO: 810700 - DNA, 19 bp, Mus musculus
  siRNA target sequence for 3000004C01Rik (NM_197959.1,1670-1688).
ctggcccagcgacaatact

SEQ ID NO: 810701 - DNA, 19 bp, Mus musculus
  siRNA target sequence for 3000004C01Rik (NM_197959.1,1943-1961).
gactgcacctcagataaga

SEQ ID NO: 810702 - DNA, 19 bp, Mus musculus
  siRNA target sequence for 3000004C01Rik (NM_197959.1,2116-2134).
gccgagaactcccaaaaga

SEQ ID NO: 810703 - DNA, 19 bp, Mus musculus
  siRNA target sequence for 3000004C01Rik (NM_197959.1,2118-2136).
cgagaactcccaaaagaga

SEQ ID NO: 810704 - DNA, 19 bp, Mus musculus
  siRNA target sequence for 3000004C01Rik (NM_197959.1,2173-2191).
cccagccacggtcattaaa

SEQ ID NO: 810705 - DNA, 19 bp, Mus musculus
  siRNA target sequence for 3000004C01Rik (NM_197959.1,2174-2192).
ccagccacggtcattaaaa

SEQ ID NO: 810706 - DNA, 19 bp, Mus musculus
  siRNA target sequence for 3000004C01Rik (NM_197959.1,2208-2226).
gcccttctgccttacagaa

SEQ ID NO: 810707 - DNA, 19 bp, Mus musculus
  siRNA target sequence for 3000004C01Rik (NM_197959.1,2376-2394).
ccagcgcacctgtcttcat

SEQ ID NO: 810708 - DNA, 19 bp, Mus musculus
  siRNA target sequence for 3000004C01Rik (NM_197959.1,2377-2395).
cagcgcacctgtcttcata

SEQ ID NO: 810709 - DNA, 19 bp, Mus musculus
  siRNA target sequence for 3000004C01Rik (NM_197959.1,2379-2397).
gcgcacctgtcttcatatt

SEQ ID NO: 810710 - DNA, 19 bp, Mus musculus
  siRNA target sequence for 3000004C01Rik (NM_197959.1,2381-2399).
gcacctgtcttcatattca

SEQ ID NO: 810711 - DNA, 19 bp, Mus musculus
  siRNA target sequence for 3000004C01Rik (NM_197959.1,2439-2457).
gcaagaagaggcgtactat

SEQ ID NO: 810712 - DNA, 19 bp, Mus musculus
  siRNA target sequence for 3000004C01Rik (NM_197959.1,2473-2491).
ccgaggccgcagctgtatt

SEQ ID NO: 810713 - DNA, 19 bp, Mus musculus
  siRNA target sequence for 3000004C01Rik (NM_197959.1,2559-2577).
gcccccactgccttgatga

SEQ ID NO: 810714 - DNA, 19 bp, Mus musculus
  siRNA target sequence for 2810437L13Rik (NM_197980.1,85-103).
ggaccacttcggtgaatgt

SEQ ID NO: 810715 - DNA, 19 bp, Mus musculus
  siRNA target sequence for 2810437L13Rik (NM_197980.1,86-104).
gaccacttcggtgaatgta

SEQ ID NO: 810716 - DNA, 19 bp, Mus musculus
  siRNA target sequence for 2810437L13Rik (NM_197980.1,88-106).
ccacttcggtgaatgtaaa

SEQ ID NO: 810717 - DNA, 19 bp, Mus musculus
  siRNA target sequence for 2810437L13Rik (NM_197980.1,95-113).
ggtgaatgtaaaagcttta

SEQ ID NO: 810718 - DNA, 19 bp, Mus musculus
  siRNA target sequence for 2810437L13Rik (NM_197980.1,129-147).
ggtgtctccgtgacaagaa

SEQ ID NO: 810719 - DNA, 19 bp, Mus musculus
  siRNA target sequence for 2810437L13Rik (NM_197980.1,132-150).
gtctccgtgacaagaacta

SEQ ID NO: 810720 - DNA, 19 bp, Mus musculus
  siRNA target sequence for 2810437L13Rik (NM_197980.1,142-160).
caagaactatgaaaatgct

SEQ ID NO: 810721 - DNA, 19 bp, Mus musculus
  siRNA target sequence for 2810437L13Rik (NM_197980.1,243-261).
gctttagagacctaatgga

SEQ ID NO: 810722 - DNA, 19 bp, Mus musculus
  siRNA target sequence for 2810437L13Rik (NM_197980.1,244-262).
ctttagagacctaatggaa

SEQ ID NO: 810723 - DNA, 19 bp, Mus musculus
  siRNA target sequence for 5930416I19Rik (NM_197981.1,614-632).
cccaaacaccactatgaat

SEQ ID NO: 810724 - DNA, 19 bp, Mus musculus
  siRNA target sequence for 5930416I19Rik (NM_197981.1,667-685).
gcccagcaagcccattgat

SEQ ID NO: 810725 - DNA, 19 bp, Mus musculus
  siRNA target sequence for 5930416I19Rik (NM_197981.1,705-723).
gggtgtcaccccagtttga

SEQ ID NO: 810726 - DNA, 19 bp, Mus musculus
  siRNA target sequence for 5930416I19Rik (NM_197981.1,706-724).
ggtgtcaccccagtttgat

SEQ ID NO: 810727 - DNA, 19 bp, Mus musculus
  siRNA target sequence for 5930416I19Rik (NM_197981.1,709-727).
gtcaccccagtttgataga

SEQ ID NO: 810728 - DNA, 19 bp, Mus musculus
  siRNA target sequence for 5930416I19Rik (NM_197981.1,731-749).
gcggaaagccggtttctga

SEQ ID NO: 810729 - DNA, 19 bp, Mus musculus
  siRNA target sequence for 5930416I19Rik (NM_197981.1,732-750).
cggaaagccggtttctgat

SEQ ID NO: 810730 - DNA, 19 bp, Mus musculus
  siRNA target sequence for 5930416I19Rik (NM_197981.1,733-751).
ggaaagccggtttctgata

SEQ ID NO: 810731 - DNA, 19 bp, Mus musculus
  siRNA target sequence for 5930416I19Rik (NM_197981.1,793-811).
gagatctacctgcaagttt

SEQ ID NO: 810732 - DNA, 19 bp, Mus musculus
  siRNA target sequence for 5930416I19Rik (NM_197981.1,808-826).
gtttccacgtctaaccttt

SEQ ID NO: 810733 - DNA, 19 bp, Mus musculus
  siRNA target sequence for 5930416I19Rik (NM_197981.1,903-921).
cacccagaaggcctttagt

SEQ ID NO: 810734 - DNA, 19 bp, Mus musculus
  siRNA target sequence for 5930416I19Rik (NM_197981.1,961-979).
gcatgtacctcacagttta

SEQ ID NO: 810735 - DNA, 19 bp, Mus musculus
  siRNA target sequence for 5930416I19Rik (NM_197981.1,1012-1030).
cccagactcttctgtaaga

SEQ ID NO: 810736 - DNA, 19 bp, Mus musculus
  siRNA target sequence for Ddx39 (NM_197982.2,305-323).
gctcctgagagctatagtt

SEQ ID NO: 810737 - DNA, 19 bp, Mus musculus
  siRNA target sequence for Ddx39 (NM_197982.2,455-473).
gcagattgagcctgtcaat

SEQ ID NO: 810738 - DNA, 19 bp, Mus musculus
  siRNA target sequence for Ddx39 (NM_197982.2,626-644).
gaagaactgtcctcatgtt

SEQ ID NO: 810739 - DNA, 19 bp, Mus musculus
  siRNA target sequence for Ddx39 (NM_197982.2,713-731).
gcactttgtgctagatgaa

SEQ ID NO: 810740 - DNA, 19 bp, Mus musculus
  siRNA target sequence for Ddx39 (NM_197982.2,798-816).
cacgagaagcagtgtatga

SEQ ID NO: 810741 - DNA, 19 bp, Mus musculus
  siRNA target sequence for Ddx39 (NM_197982.2,1056-1074).
ctcctagtggagcagaatt

SEQ ID NO: 810742 - DNA, 19 bp, Mus musculus
  siRNA target sequence for Ddx39 (NM_197982.2,1161-1179).
ctggtggctactaatctgt

SEQ ID NO: 810743 - DNA, 19 bp, Mus musculus
  siRNA target sequence for Ddx39 (NM_197982.2,1183-1201).
gcagaggtatggacattga

SEQ ID NO: 810744 - DNA, 19 bp, Mus musculus
  siRNA target sequence for Ddx39 (NM_197982.2,1269-1287).
cgtgctggtcgctttggta

SEQ ID NO: 810745 - DNA, 19 bp, Mus musculus
  siRNA target sequence for Ddx39 (NM_197982.2,1355-1373).
ccggtttgaagtgaatgta

SEQ ID NO: 810746 - DNA, 19 bp, Mus musculus
  siRNA target sequence for Ddx39 (NM_197982.2,1375-1393).
ctgagcttccagaggaaat

SEQ ID NO: 810747 - DNA, 19 bp, Mus musculus
  siRNA target sequence for 0610008F07Rik (NM_197983.1,397-415).
ccggatatggcaaactgat

SEQ ID NO: 810748 - DNA, 19 bp, Mus musculus
  siRNA target sequence for 0610008F07Rik (NM_197983.1,438-456).
ggagcacgtgtgtccattt

SEQ ID NO: 810749 - DNA, 19 bp, Mus musculus
  siRNA target sequence for 0610008F07Rik (NM_197983.1,529-547).
caccacgcagacaagaaat

SEQ ID NO: 810750 - DNA, 19 bp, Mus musculus
  siRNA target sequence for 1110001I14Rik (NM_197985.2,190-208).
ggactccagagccagatat

SEQ ID NO: 810751 - DNA, 19 bp, Mus musculus
  siRNA target sequence for 1110001I14Rik (NM_197985.2,191-209).
gactccagagccagatata

SEQ ID NO: 810752 - DNA, 19 bp, Mus musculus
  siRNA target sequence for 1110001I14Rik (NM_197985.2,222-240).
gggcaccaacttgatgata

SEQ ID NO: 810753 - DNA, 19 bp, Mus musculus
  siRNA target sequence for 1110001I14Rik (NM_197985.2,224-242).
gcaccaacttgatgataca

SEQ ID NO: 810754 - DNA, 19 bp, Mus musculus
  siRNA target sequence for 1110001I14Rik (NM_197985.2,237-255).
gatacaaggggaagtaata

SEQ ID NO: 810755 - DNA, 19 bp, Mus musculus
  siRNA target sequence for 1110001I14Rik (NM_197985.2,247-265).
gaagtaataatgacaacta

SEQ ID NO: 810756 - DNA, 19 bp, Mus musculus
  siRNA target sequence for 1110001I14Rik (NM_197985.2,332-350).
ggagcccgagtgtcatgat

SEQ ID NO: 810757 - DNA, 19 bp, Mus musculus
  siRNA target sequence for 1110001I14Rik (NM_197985.2,337-355).
ccgagtgtcatgatgacaa

SEQ ID NO: 810758 - DNA, 19 bp, Mus musculus
  siRNA target sequence for 1110001I14Rik (NM_197985.2,401-419).
ggcccatcatgctatggaa

SEQ ID NO: 810759 - DNA, 19 bp, Mus musculus
  siRNA target sequence for 1110001I14Rik (NM_197985.2,486-504).
ccggattggcttaaggata

SEQ ID NO: 810760 - DNA, 19 bp, Mus musculus
  siRNA target sequence for 1110001I14Rik (NM_197985.2,487-505).
cggattggcttaaggataa

SEQ ID NO: 810761 - DNA, 19 bp, Mus musculus
  siRNA target sequence for 1110001I14Rik (NM_197985.2,488-506).
ggattggcttaaggataat

SEQ ID NO: 810762 - DNA, 19 bp, Mus musculus
  siRNA target sequence for 1110001I14Rik (NM_197985.2,544-562).
cctttcgggcctgttttaa

SEQ ID NO: 810763 - DNA, 19 bp, Mus musculus
  siRNA target sequence for 1110001I14Rik (NM_197985.2,552-570).
gcctgttttaagagcattt

SEQ ID NO: 810764 - DNA, 19 bp, Mus musculus
  siRNA target sequence for 1110001I14Rik (NM_197985.2,606-624).
catctcctaggttgtgtat

SEQ ID NO: 810765 - DNA, 19 bp, Mus musculus
  siRNA target sequence for 1110001I14Rik (NM_197985.2,609-627).
ctcctaggttgtgtattct

SEQ ID NO: 810766 - DNA, 19 bp, Mus musculus
  siRNA target sequence for 1110001I14Rik (NM_197985.2,787-805).
cccgactcttctctaaatt

SEQ ID NO: 810767 - DNA, 19 bp, Mus musculus
  siRNA target sequence for 1110001I14Rik (NM_197985.2,790-808).
gactcttctctaaattgga

SEQ ID NO: 810768 - DNA, 19 bp, Mus musculus
  siRNA target sequence for 1110001I14Rik (NM_197985.2,846-864).
gttccttggctttattatt

SEQ ID NO: 810769 - DNA, 19 bp, Mus musculus
  siRNA target sequence for 1110001I14Rik (NM_197985.2,956-974).
gtttgccacccctcagtat

SEQ ID NO: 810770 - DNA, 19 bp, Mus musculus
  siRNA target sequence for 1110001I14Rik (NM_197985.2,1022-1040).
catccctaccttgcattat

SEQ ID NO: 810771 - DNA, 19 bp, Mus musculus
  siRNA target sequence for 1110001I14Rik (NM_197985.2,1082-1100).
gataggctggctaatgctt

SEQ ID NO: 810772 - DNA, 19 bp, Mus musculus
  siRNA target sequence for 1110001I14Rik (NM_197985.2,1250-1268).
ctcaaacctgcaggaattt

SEQ ID NO: 810773 - DNA, 19 bp, Mus musculus
  siRNA target sequence for 1110001I14Rik (NM_197985.2,1260-1278).
caggaatttcgtttcatga

SEQ ID NO: 810774 - DNA, 19 bp, Mus musculus
  siRNA target sequence for 1110001I14Rik (NM_197985.2,1262-1280).
ggaatttcgtttcatgatt

SEQ ID NO: 810775 - DNA, 19 bp, Mus musculus
  siRNA target sequence for 1110007F12Rik (NM_197986.1,352-370).
ctgagaatcggcttctaca

SEQ ID NO: 810776 - DNA, 19 bp, Mus musculus
  siRNA target sequence for 1110007F12Rik (NM_197986.1,356-374).
gaatcggcttctacaactt

SEQ ID NO: 810777 - DNA, 19 bp, Mus musculus
  siRNA target sequence for Trim37 (NM_197987.1,426-444).
ctgaggttttccgatgttt

SEQ ID NO: 810778 - DNA, 19 bp, Mus musculus
  siRNA target sequence for Trim37 (NM_197987.1,594-612).
gtcgttgggcggaagaagt

SEQ ID NO: 810779 - DNA, 19 bp, Mus musculus
  siRNA target sequence for Trim37 (NM_197987.1,640-658).
gtgtagtctcaccaaacat

SEQ ID NO: 810780 - DNA, 19 bp, Mus musculus
  siRNA target sequence for Trim37 (NM_197987.1,642-660).
gtagtctcaccaaacatga

SEQ ID NO: 810781 - DNA, 19 bp, Mus musculus
  siRNA target sequence for Trim37 (NM_197987.1,707-725).
gtgttttgctggacttgta

SEQ ID NO: 810782 - DNA, 19 bp, Mus musculus
  siRNA target sequence for Trim37 (NM_197987.1,717-735).
ggacttgtaagaagtgtat

SEQ ID NO: 810783 - DNA, 19 bp, Mus musculus
  siRNA target sequence for Trim37 (NM_197987.1,774-792).
gacacacgtttaaaccttt

SEQ ID NO: 810784 - DNA, 19 bp, Mus musculus
  siRNA target sequence for Trim37 (NM_197987.1,865-883).
gctgatcagcttagttcaa

SEQ ID NO: 810785 - DNA, 19 bp, Mus musculus
  siRNA target sequence for Trim37 (NM_197987.1,926-944).
gagcgtgttcgggaaatta

SEQ ID NO: 810786 - DNA, 19 bp, Mus musculus
  siRNA target sequence for Trim37 (NM_197987.1,929-947).
cgtgttcgggaaattagga

SEQ ID NO: 810787 - DNA, 19 bp, Mus musculus
  siRNA target sequence for Trim37 (NM_197987.1,945-963).
ggaatgcggtagagatgat

SEQ ID NO: 810788 - DNA, 19 bp, Mus musculus
  siRNA target sequence for Trim37 (NM_197987.1,961-979).
gatgattgcacgactagat

SEQ ID NO: 810789 - DNA, 19 bp, Mus musculus
  siRNA target sequence for Trim37 (NM_197987.1,964-982).
gattgcacgactagataca

SEQ ID NO: 810790 - DNA, 19 bp, Mus musculus
  siRNA target sequence for Trim37 (NM_197987.1,1021-1039).
gacatctcttactcaagaa

SEQ ID NO: 810791 - DNA, 19 bp, Mus musculus
  siRNA target sequence for Trim37 (NM_197987.1,1037-1055).
gaaacggagctgttggaat

SEQ ID NO: 810792 - DNA, 19 bp, Mus musculus
  siRNA target sequence for Trim37 (NM_197987.1,1041-1059).
cggagctgttggaatcttt

SEQ ID NO: 810793 - DNA, 19 bp, Mus musculus
  siRNA target sequence for Trim37 (NM_197987.1,1119-1137).
gctcagagatcctaatgat

SEQ ID NO: 810794 - DNA, 19 bp, Mus musculus
  siRNA target sequence for Trim37 (NM_197987.1,1194-1212).
cagactttaccagtgaatt

SEQ ID NO: 810795 - DNA, 19 bp, Mus musculus
  siRNA target sequence for Trim37 (NM_197987.1,1213-1231).
ggtaccatcctatgattca

SEQ ID NO: 810796 - DNA, 19 bp, Mus musculus
  siRNA target sequence for Trim37 (NM_197987.1,1288-1306).
cagtccgcctcttcaagtt

SEQ ID NO: 810797 - DNA, 19 bp, Mus musculus
  siRNA target sequence for Trim37 (NM_197987.1,1317-1335).
gttggaggttaaaagttta

SEQ ID NO: 810798 - DNA, 19 bp, Mus musculus
  siRNA target sequence for Trim37 (NM_197987.1,1352-1370).
gttgtacgtggctattatt

SEQ ID NO: 810799 - DNA, 19 bp, Mus musculus
  siRNA target sequence for Trim37 (NM_197987.1,1355-1373).
gtacgtggctattatttat

SEQ ID NO: 810800 - DNA, 19 bp, Mus musculus
  siRNA target sequence for Trim37 (NM_197987.1,1406-1424).
gaaacttccaagtatgaat

SEQ ID NO: 810801 - DNA, 19 bp, Mus musculus
  siRNA target sequence for Trim37 (NM_197987.1,1417-1435).
gtatgaatatcgtgtagaa

SEQ ID NO: 810802 - DNA, 19 bp, Mus musculus
  siRNA target sequence for Trim37 (NM_197987.1,1449-1467).
cgtgcaatgatcctacaaa

SEQ ID NO: 810803 - DNA, 19 bp, Mus musculus
  siRNA target sequence for Trim37 (NM_197987.1,1450-1468).
gtgcaatgatcctacaaaa

SEQ ID NO: 810804 - DNA, 19 bp, Mus musculus
  siRNA target sequence for Trim37 (NM_197987.1,1452-1470).
gcaatgatcctacaaaaaa

SEQ ID NO: 810805 - DNA, 19 bp, Mus musculus
  siRNA target sequence for Trim37 (NM_197987.1,1453-1471).
caatgatcctacaaaaaat

SEQ ID NO: 810806 - DNA, 19 bp, Mus musculus
  siRNA target sequence for Trim37 (NM_197987.1,1512-1530).
gctggggctacaataggtt

SEQ ID NO: 810807 - DNA, 19 bp, Mus musculus
  siRNA target sequence for Trim37 (NM_197987.1,1513-1531).
ctggggctacaataggttt

SEQ ID NO: 810808 - DNA, 19 bp, Mus musculus
  siRNA target sequence for Trim37 (NM_197987.1,1519-1537).
ctacaataggttttttcgt

SEQ ID NO: 810809 - DNA, 19 bp, Mus musculus
  siRNA target sequence for Trim37 (NM_197987.1,1540-1558).
ggatttacttgcaaacgaa

SEQ ID NO: 810810 - DNA, 19 bp, Mus musculus
  siRNA target sequence for Trim37 (NM_197987.1,1550-1568).
gcaaacgaaggatacttga

SEQ ID NO: 810811 - DNA, 19 bp, Mus musculus
  siRNA target sequence for Trim37 (NM_197987.1,1551-1569).
caaacgaaggatacttgaa

SEQ ID NO: 810812 - DNA, 19 bp, Mus musculus
  siRNA target sequence for Trim37 (NM_197987.1,1560-1578).
gatacttgaaccgacaaaa

SEQ ID NO: 810813 - DNA, 19 bp, Mus musculus
  siRNA target sequence for Trim37 (NM_197987.1,1564-1582).
cttgaaccgacaaaatgat

SEQ ID NO: 810814 - DNA, 19 bp, Mus musculus
  siRNA target sequence for Trim37 (NM_197987.1,1603-1621).
ggtgcgctcaccaacattt

SEQ ID NO: 810815 - DNA, 19 bp, Mus musculus
  siRNA target sequence for Trim37 (NM_197987.1,1608-1626).
gctcaccaacattttttca

SEQ ID NO: 810816 - DNA, 19 bp, Mus musculus
  siRNA target sequence for Trim37 (NM_197987.1,1635-1653).
gggatcagcactggtatat

SEQ ID NO: 810817 - DNA, 19 bp, Mus musculus
  siRNA target sequence for Trim37 (NM_197987.1,1636-1654).
ggatcagcactggtatatt

SEQ ID NO: 810818 - DNA, 19 bp, Mus musculus
  siRNA target sequence for Trim37 (NM_197987.1,1667-1685).
gctgcacagactggttata

SEQ ID NO: 810819 - DNA, 19 bp, Mus musculus
  siRNA target sequence for Trim37 (NM_197987.1,1668-1686).
ctgcacagactggttatat

SEQ ID NO: 810820 - DNA, 19 bp, Mus musculus
  siRNA target sequence for Trim37 (NM_197987.1,1671-1689).
cacagactggttatatcca

SEQ ID NO: 810821 - DNA, 19 bp, Mus musculus
  siRNA target sequence for Trim37 (NM_197987.1,1677-1695).
ctggttatatccaacaaat

SEQ ID NO: 810822 - DNA, 19 bp, Mus musculus
  siRNA target sequence for Trim37 (NM_197987.1,1756-1774).
gtcaccaccagataatcat

SEQ ID NO: 810823 - DNA, 19 bp, Mus musculus
  siRNA target sequence for Trim37 (NM_197987.1,1760-1778).
ccaccagataatcatctta

SEQ ID NO: 810824 - DNA, 19 bp, Mus musculus
  siRNA target sequence for Trim37 (NM_197987.1,1797-1815).
ctcctgagacacgaactaa

SEQ ID NO: 810825 - DNA, 19 bp, Mus musculus
  siRNA target sequence for Trim37 (NM_197987.1,1799-1817).
cctgagacacgaactaaga

SEQ ID NO: 810826 - DNA, 19 bp, Mus musculus
  siRNA target sequence for Trim37 (NM_197987.1,1800-1818).
ctgagacacgaactaagaa

SEQ ID NO: 810827 - DNA, 19 bp, Mus musculus
  siRNA target sequence for Trim37 (NM_197987.1,1909-1927).
gattcagaatgaagactat

SEQ ID NO: 810828 - DNA, 19 bp, Mus musculus
  siRNA target sequence for Trim37 (NM_197987.1,2081-2099).
gatgtagaatataacagta

SEQ ID NO: 810829 - DNA, 19 bp, Mus musculus
  siRNA target sequence for Trim37 (NM_197987.1,2174-2192).
ggtgccagtagcagaatgt

SEQ ID NO: 810830 - DNA, 19 bp, Mus musculus
  siRNA target sequence for Trim37 (NM_197987.1,2220-2238).
ctaccagtagcttactaga

SEQ ID NO: 810831 - DNA, 19 bp, Mus musculus
  siRNA target sequence for Trim37 (NM_197987.1,2223-2241).
ccagtagcttactagacat

SEQ ID NO: 810832 - DNA, 19 bp, Mus musculus
  siRNA target sequence for Trim37 (NM_197987.1,2224-2242).
cagtagcttactagacatt

SEQ ID NO: 810833 - DNA, 19 bp, Mus musculus
  siRNA target sequence for Trim37 (NM_197987.1,2234-2252).
ctagacattgatcctttaa

SEQ ID NO: 810834 - DNA, 19 bp, Mus musculus
  siRNA target sequence for Trim37 (NM_197987.1,2278-2296).
ggaccggagcagtatggaa

SEQ ID NO: 810835 - DNA, 19 bp, Mus musculus
  siRNA target sequence for Trim37 (NM_197987.1,2283-2301).
ggagcagtatggaaaacct

SEQ ID NO: 810836 - DNA, 19 bp, Mus musculus
  siRNA target sequence for Trim37 (NM_197987.1,2338-2356).
gcagcccacagcatcatat

SEQ ID NO: 810837 - DNA, 19 bp, Mus musculus
  siRNA target sequence for Trim37 (NM_197987.1,2349-2367).
catcatattctcgaaaaga

SEQ ID NO: 810838 - DNA, 19 bp, Mus musculus
  siRNA target sequence for Trim37 (NM_197987.1,2352-2370).
catattctcgaaaagataa

SEQ ID NO: 810839 - DNA, 19 bp, Mus musculus
  siRNA target sequence for Trim37 (NM_197987.1,2358-2376).
ctcgaaaagataaagatca

SEQ ID NO: 810840 - DNA, 19 bp, Mus musculus
  siRNA target sequence for Trim37 (NM_197987.1,2360-2378).
cgaaaagataaagatcaaa

SEQ ID NO: 810841 - DNA, 19 bp, Mus musculus
  siRNA target sequence for Trim37 (NM_197987.1,2447-2465).
gctgaagtccggtgtatga

SEQ ID NO: 810842 - DNA, 19 bp, Mus musculus
  siRNA target sequence for Trim37 (NM_197987.1,2448-2466).
ctgaagtccggtgtatgaa

SEQ ID NO: 810843 - DNA, 19 bp, Mus musculus
  siRNA target sequence for Trim37 (NM_197987.1,2450-2468).
gaagtccggtgtatgaaga

SEQ ID NO: 810844 - DNA, 19 bp, Mus musculus
  siRNA target sequence for Trim37 (NM_197987.1,2460-2478).
gtatgaagactgatgtgaa

SEQ ID NO: 810845 - DNA, 19 bp, Mus musculus
  siRNA target sequence for Trim37 (NM_197987.1,2479-2497).
gactacgctgtcagatata

SEQ ID NO: 810846 - DNA, 19 bp, Mus musculus
  siRNA target sequence for Trim37 (NM_197987.1,2481-2499).
ctacgctgtcagatataaa

SEQ ID NO: 810847 - DNA, 19 bp, Mus musculus
  siRNA target sequence for Trim37 (NM_197987.1,2522-2540).
gacatgcagacaaacctat

SEQ ID NO: 810848 - DNA, 19 bp, Mus musculus
  siRNA target sequence for Trim37 (NM_197987.1,2569-2587).
ctgtggacccgaaaactct

SEQ ID NO: 810849 - DNA, 19 bp, Mus musculus
  siRNA target sequence for Trim37 (NM_197987.1,2577-2595).
ccgaaaactctggtagatt

SEQ ID NO: 810850 - DNA, 19 bp, Mus musculus
  siRNA target sequence for Trim37 (NM_197987.1,2578-2596).
cgaaaactctggtagatta

SEQ ID NO: 810851 - DNA, 19 bp, Mus musculus
  siRNA target sequence for Trim37 (NM_197987.1,2586-2604).
ctggtagattacaggattt

SEQ ID NO: 810852 - DNA, 19 bp, Mus musculus
  siRNA target sequence for Trim37 (NM_197987.1,2637-2655).
ctggctgttacatacgaaa

SEQ ID NO: 810853 - DNA, 19 bp, Mus musculus
  siRNA target sequence for Trim37 (NM_197987.1,2647-2665).
catacgaaaccccacaaat

SEQ ID NO: 810854 - DNA, 19 bp, Mus musculus
  siRNA target sequence for Trim37 (NM_197987.1,2651-2669).
cgaaaccccacaaataaga

SEQ ID NO: 810855 - DNA, 19 bp, Mus musculus
  siRNA target sequence for Trim37 (NM_197987.1,2736-2754).
gagaaaatagccgttcaaa

SEQ ID NO: 810856 - DNA, 19 bp, Mus musculus
  siRNA target sequence for Trim37 (NM_197987.1,2928-2946).
gtttacctactgttgagaa

SEQ ID NO: 810857 - DNA, 19 bp, Mus musculus
  siRNA target sequence for Trim37 (NM_197987.1,2985-3003).
gaggtcgtctggaaggaat

SEQ ID NO: 810858 - DNA, 19 bp, Mus musculus
  siRNA target sequence for Trim37 (NM_197987.1,3219-3237).
ctgatggtgaacaaataga

SEQ ID NO: 810859 - DNA, 19 bp, Mus musculus
  siRNA target sequence for 1190005I06Rik (NM_197988.1,229-247).
cctgagcgtgcccaacatt

SEQ ID NO: 810860 - DNA, 19 bp, Mus musculus
  siRNA target sequence for 1190005I06Rik (NM_197988.1,230-248).
ctgagcgtgcccaacatta

SEQ ID NO: 810861 - DNA, 19 bp, Mus musculus
  siRNA target sequence for 1190005I06Rik (NM_197988.1,278-296).
gggctttcccgggattcta

SEQ ID NO: 810862 - DNA, 19 bp, Mus musculus
  siRNA target sequence for 1190005I06Rik (NM_197988.1,279-297).
ggctttcccgggattctaa

SEQ ID NO: 810863 - DNA, 19 bp, Mus musculus
  siRNA target sequence for 1190005I06Rik (NM_197988.1,281-299).
ctttcccgggattctaaca

SEQ ID NO: 810864 - DNA, 19 bp, Mus musculus
  siRNA target sequence for 1190005I06Rik (NM_197988.1,313-331).
ggatgagctggggtcttat

SEQ ID NO: 810865 - DNA, 19 bp, Mus musculus
  siRNA target sequence for 1810009O10Rik (NM_197989.1,158-176).
cgagtaacccggtttatca

SEQ ID NO: 810866 - DNA, 19 bp, Mus musculus
  siRNA target sequence for 1810009O10Rik (NM_197989.1,159-177).
gagtaacccggtttatcat

SEQ ID NO: 810867 - DNA, 19 bp, Mus musculus
  siRNA target sequence for 1810009O10Rik (NM_197989.1,219-237).
ccaccgcttgcaccattta

SEQ ID NO: 810868 - DNA, 19 bp, Mus musculus
  siRNA target sequence for 1810009O10Rik (NM_197989.1,222-240).
ccgcttgcaccatttacca

SEQ ID NO: 810869 - DNA, 19 bp, Mus musculus
  siRNA target sequence for 1810009O10Rik (NM_197989.1,223-241).
cgcttgcaccatttaccat

SEQ ID NO: 810870 - DNA, 19 bp, Mus musculus
  siRNA target sequence for 1810009O10Rik (NM_197989.1,358-376).
cgtgtcgcacaggtacttt

SEQ ID NO: 810871 - DNA, 19 bp, Mus musculus
  siRNA target sequence for 1810009O10Rik (NM_197989.1,359-377).
gtgtcgcacaggtacttta

SEQ ID NO: 810872 - DNA, 19 bp, Mus musculus
  siRNA target sequence for 1810009O10Rik (NM_197989.1,560-578).
cgaacccccatctcagtta

SEQ ID NO: 810873 - DNA, 19 bp, Mus musculus
  siRNA target sequence for 1700025G04Rik (NM_197990.1,315-333).
caagcatgtcgctactgtt

SEQ ID NO: 810874 - DNA, 19 bp, Mus musculus
  siRNA target sequence for 1700025G04Rik (NM_197990.1,318-336).
gcatgtcgctactgttcaa

SEQ ID NO: 810875 - DNA, 19 bp, Mus musculus
  siRNA target sequence for 1700025G04Rik (NM_197990.1,319-337).
catgtcgctactgttcaaa

SEQ ID NO: 810876 - DNA, 19 bp, Mus musculus
  siRNA target sequence for 1700025G04Rik (NM_197990.1,382-400).
gtgtttggcgatgagtata

SEQ ID NO: 810877 - DNA, 19 bp, Mus musculus
  siRNA target sequence for 1700025G04Rik (NM_197990.1,415-433).
gaagaggtcaaatacatga

SEQ ID NO: 810878 - DNA, 19 bp, Mus musculus
  siRNA target sequence for 1700025G04Rik (NM_197990.1,420-438).
ggtcaaatacatgaaaaat

SEQ ID NO: 810879 - DNA, 19 bp, Mus musculus
  siRNA target sequence for 1700025G04Rik (NM_197990.1,501-519).
ctcgaacacaaggcttaaa

SEQ ID NO: 810880 - DNA, 19 bp, Mus musculus
  siRNA target sequence for 1700025G04Rik (NM_197990.1,534-552).
ccctggattagttcatcaa

SEQ ID NO: 810881 - DNA, 19 bp, Mus musculus
  siRNA target sequence for 2310044H10Rik (NM_197991.1,201-219).
gctgctggagcattcattt

SEQ ID NO: 810882 - DNA, 19 bp, Mus musculus
  siRNA target sequence for 2310044H10Rik (NM_197991.1,548-566).
gctccgaggtggaagatga

SEQ ID NO: 810883 - DNA, 19 bp, Mus musculus
  siRNA target sequence for 2310044H10Rik (NM_197991.1,710-728).
ccaaatactggatgtacat

SEQ ID NO: 810884 - DNA, 19 bp, Mus musculus
  siRNA target sequence for Nspc1 (NM_197992.1,117-135).
ctgaatgaacacatcgttt

SEQ ID NO: 810885 - DNA, 19 bp, Mus musculus
  siRNA target sequence for Nspc1 (NM_197992.1,193-211).
ccttctgcaaaagttgtat

SEQ ID NO: 810886 - DNA, 19 bp, Mus musculus
  siRNA target sequence for Nspc1 (NM_197992.1,271-289).
cgcagccgttgctcaatct

SEQ ID NO: 810887 - DNA, 19 bp, Mus musculus
  siRNA target sequence for Nspc1 (NM_197992.1,273-291).
cagccgttgctcaatctca

SEQ ID NO: 810888 - DNA, 19 bp, Mus musculus
  siRNA target sequence for Nspc1 (NM_197992.1,275-293).
gccgttgctcaatctcaaa

SEQ ID NO: 810889 - DNA, 19 bp, Mus musculus
  siRNA target sequence for Nspc1 (NM_197992.1,277-295).
cgttgctcaatctcaaact

SEQ ID NO: 810890 - DNA, 19 bp, Mus musculus
  siRNA target sequence for Nspc1 (NM_197992.1,303-321).
gtcatgcaggacatagtgt

SEQ ID NO: 810891 - DNA, 19 bp, Mus musculus
  siRNA target sequence for Nspc1 (NM_197992.1,311-329).
ggacatagtgtataagcta

SEQ ID NO: 810892 - DNA, 19 bp, Mus musculus
  siRNA target sequence for Nspc1 (NM_197992.1,361-379).
ggattcgggaattctatca

SEQ ID NO: 810893 - DNA, 19 bp, Mus musculus
  siRNA target sequence for Nspc1 (NM_197992.1,465-483).
cactctaaagcccactatt

SEQ ID NO: 810894 - DNA, 19 bp, Mus musculus
  siRNA target sequence for Nspc1 (NM_197992.1,467-485).
ctctaaagcccactattat

SEQ ID NO: 810895 - DNA, 19 bp, Mus musculus
  siRNA target sequence for Nspc1 (NM_197992.1,475-493).
cccactattatcgatatga

SEQ ID NO: 810896 - DNA, 19 bp, Mus musculus
  siRNA target sequence for Nspc1 (NM_197992.1,476-494).
ccactattatcgatatgat

SEQ ID NO: 810897 - DNA, 19 bp, Mus musculus
  siRNA target sequence for Nspc1 (NM_197992.1,479-497).
ctattatcgatatgatgaa

SEQ ID NO: 810898 - DNA, 19 bp, Mus musculus
  siRNA target sequence for Nspc1 (NM_197992.1,522-540).
ctgagttctggcaaagaca

SEQ ID NO: 810899 - DNA, 19 bp, Mus musculus
  siRNA target sequence for Nspc1 (NM_197992.1,617-635).
gtgtcaccgactaatgcta

SEQ ID NO: 810900 - DNA, 19 bp, Mus musculus
  siRNA target sequence for Nspc1 (NM_197992.1,619-637).
gtcaccgactaatgctaaa

SEQ ID NO: 810901 - DNA, 19 bp, Mus musculus
  siRNA target sequence for Nspc1 (NM_197992.1,623-641).
ccgactaatgctaaatcca

SEQ ID NO: 810902 - DNA, 19 bp, Mus musculus
  siRNA target sequence for Nspc1 (NM_197992.1,644-662).
gcatgtacagctccttttt

SEQ ID NO: 810903 - DNA, 19 bp, Mus musculus
  siRNA target sequence for Nspc1 (NM_197992.1,648-666).
gtacagctcctttttgaca

SEQ ID NO: 810904 - DNA, 19 bp, Mus musculus
  siRNA target sequence for Nspc1 (NM_197992.1,675-693).
ctcccagatcacatgacaa

SEQ ID NO: 810905 - DNA, 19 bp, Mus musculus
  siRNA target sequence for Nspc1 (NM_197992.1,678-696).
ccagatcacatgacaatga

SEQ ID NO: 810906 - DNA, 19 bp, Mus musculus
  siRNA target sequence for Nspc1 (NM_197992.1,733-751).
ctcctttgcttctccaata

SEQ ID NO: 810907 - DNA, 19 bp, Mus musculus
  siRNA target sequence for Nspc1 (NM_197992.1,735-753).
cctttgcttctccaataca

SEQ ID NO: 810908 - DNA, 19 bp, Mus musculus
  siRNA target sequence for 2700038E08Rik (NM_197993.1,124-142).
gtggattcggacgttgtat

SEQ ID NO: 810909 - DNA, 19 bp, Mus musculus
  siRNA target sequence for 2700038E08Rik (NM_197993.1,171-189).
cctctgcgatgttactaca

SEQ ID NO: 810910 - DNA, 19 bp, Mus musculus
  siRNA target sequence for 2700038E08Rik (NM_197993.1,203-221).
gcctcgatgcccacttgaa

SEQ ID NO: 810911 - DNA, 19 bp, Mus musculus
  siRNA target sequence for 2700038E08Rik (NM_197993.1,204-222).
cctcgatgcccacttgaaa

SEQ ID NO: 810912 - DNA, 19 bp, Mus musculus
  siRNA target sequence for 2700038E08Rik (NM_197993.1,227-245).
ggaagcaccgggatttggt

SEQ ID NO: 810913 - DNA, 19 bp, Mus musculus
  siRNA target sequence for 2700038E08Rik (NM_197993.1,275-293).
gactccgaagtgtgtttgt

SEQ ID NO: 810914 - DNA, 19 bp, Mus musculus
  siRNA target sequence for 2700038E08Rik (NM_197993.1,332-350).
ctgagtacttccagacatt

SEQ ID NO: 810915 - DNA, 19 bp, Mus musculus
  siRNA target sequence for 2700038E08Rik (NM_197993.1,402-420).
cgtggagatgggagacata

SEQ ID NO: 810916 - DNA, 19 bp, Mus musculus
  siRNA target sequence for 2700038E08Rik (NM_197993.1,405-423).
ggagatgggagacataagt

SEQ ID NO: 810917 - DNA, 19 bp, Mus musculus
  siRNA target sequence for 2700038E08Rik (NM_197993.1,424-442).
gctcgggaggctgtcttat

SEQ ID NO: 810918 - DNA, 19 bp, Mus musculus
  siRNA target sequence for 2700038E08Rik (NM_197993.1,428-446).
gggaggctgtcttatcaca

SEQ ID NO: 810919 - DNA, 19 bp, Mus musculus
  siRNA target sequence for 2700038E08Rik (NM_197993.1,725-743).
gctctactgtaaatagctt

SEQ ID NO: 810920 - DNA, 19 bp, Mus musculus
  siRNA target sequence for 2700038E08Rik (NM_197993.1,726-744).
ctctactgtaaatagcttt

SEQ ID NO: 810921 - DNA, 19 bp, Mus musculus
  siRNA target sequence for 2700038E08Rik (NM_197993.1,731-749).
ctgtaaatagctttgatgt

SEQ ID NO: 810922 - DNA, 19 bp, Mus musculus
  siRNA target sequence for 2700038E08Rik (NM_197993.1,758-776).
gtgatctcgacctcttctt

SEQ ID NO: 810923 - DNA, 19 bp, Mus musculus
  siRNA target sequence for 2700038E08Rik (NM_197993.1,1078-1096).
caggggaaagagctagaat

SEQ ID NO: 810924 - DNA, 19 bp, Mus musculus
  siRNA target sequence for 2700038E08Rik (NM_197993.1,1217-1235).
ggcgtcctgtggtcaagtt

SEQ ID NO: 810925 - DNA, 19 bp, Mus musculus
  siRNA target sequence for 2700038E08Rik (NM_197993.1,1262-1280).
gagatgtatccctcagtaa

SEQ ID NO: 810926 - DNA, 19 bp, Mus musculus
  siRNA target sequence for 2700038E08Rik (NM_197993.1,1277-1295).
gtaaccggttggccttata

SEQ ID NO: 810927 - DNA, 19 bp, Mus musculus
  siRNA target sequence for 2700038E08Rik (NM_197993.1,1281-1299).
ccggttggccttatataat

SEQ ID NO: 810928 - DNA, 19 bp, Mus musculus
  siRNA target sequence for 2700038E08Rik (NM_197993.1,1282-1300).
cggttggccttatataatt

SEQ ID NO: 810929 - DNA, 19 bp, Mus musculus
  siRNA target sequence for 2700038E08Rik (NM_197993.1,1284-1302).
gttggccttatataattca

SEQ ID NO: 810930 - DNA, 19 bp, Mus musculus
  siRNA target sequence for 2700038E08Rik (NM_197993.1,1364-1382).
gctgctgggctcagcataa

SEQ ID NO: 810931 - DNA, 19 bp, Mus musculus
  siRNA target sequence for 2700038E08Rik (NM_197993.1,1365-1383).
ctgctgggctcagcataat

SEQ ID NO: 810932 - DNA, 19 bp, Mus musculus
  siRNA target sequence for 2700038E08Rik (NM_197993.1,1416-1434).
ctacgccttgacgttgtta

SEQ ID NO: 810933 - DNA, 19 bp, Mus musculus
  siRNA target sequence for 2700038E08Rik (NM_197993.1,1421-1439).
ccttgacgttgttagtgat

SEQ ID NO: 810934 - DNA, 19 bp, Mus musculus
  siRNA target sequence for 2700038E08Rik (NM_197993.1,1427-1445).
cgttgttagtgatctactt

SEQ ID NO: 810935 - DNA, 19 bp, Mus musculus
  siRNA target sequence for 2700038E08Rik (NM_197993.1,1667-1685).
gggaaggtcggccattgat

SEQ ID NO: 810936 - DNA, 19 bp, Mus musculus
  siRNA target sequence for 2700038E08Rik (NM_197993.1,1725-1743).
gcgccttggccccatgaat

SEQ ID NO: 810937 - DNA, 19 bp, Mus musculus
  siRNA target sequence for 2700038E08Rik (NM_197993.1,1727-1745).
gccttggccccatgaatct

SEQ ID NO: 810938 - DNA, 19 bp, Mus musculus
  siRNA target sequence for 2700038E08Rik (NM_197993.1,1966-1984).
ccctttccacaggtcatta

SEQ ID NO: 810939 - DNA, 19 bp, Mus musculus
  siRNA target sequence for 2700038E08Rik (NM_197993.1,2012-2030).
cactaggatgccacataga

SEQ ID NO: 810940 - DNA, 19 bp, Mus musculus
  siRNA target sequence for 2700038E08Rik (NM_197993.1,2085-2103).
gggaggggtgaacaaaaga

SEQ ID NO: 810941 - DNA, 19 bp, Mus musculus
  siRNA target sequence for 2700038E08Rik (NM_197993.1,2279-2297).
ctgcaaactgtctagacaa

SEQ ID NO: 810942 - DNA, 19 bp, Mus musculus
  siRNA target sequence for 2700038E08Rik (NM_197993.1,2401-2419).
gccttgtggcaccaagtat

SEQ ID NO: 810943 - DNA, 19 bp, Mus musculus
  siRNA target sequence for 2700038E08Rik (NM_197993.1,2433-2451).
gcgtgcccggagacgatta

SEQ ID NO: 810944 - DNA, 19 bp, Mus musculus
  siRNA target sequence for 2700038E08Rik (NM_197993.1,2435-2453).
gtgcccggagacgattaca

SEQ ID NO: 810945 - DNA, 19 bp, Mus musculus
  siRNA target sequence for 2700038E08Rik (NM_197993.1,2521-2539).
cgtgtgacccaggaactaa

SEQ ID NO: 810946 - DNA, 19 bp, Mus musculus
  siRNA target sequence for 2700038E08Rik (NM_197993.1,2658-2676).
gttccctggtcttcatcat

SEQ ID NO: 810947 - DNA, 19 bp, Mus musculus
  siRNA target sequence for 2700038E08Rik (NM_197993.1,2696-2714).
ctcaagcacttaaaaatct

SEQ ID NO: 810948 - DNA, 19 bp, Mus musculus
  siRNA target sequence for 2210408E11Rik (NM_197994.1,498-516).
gaaaagtcctcgagattct

SEQ ID NO: 810949 - DNA, 19 bp, Mus musculus
  siRNA target sequence for 2210408E11Rik (NM_197994.1,511-529).
gattcttacgagtttggtt

SEQ ID NO: 810950 - DNA, 19 bp, Mus musculus
  siRNA target sequence for 2210408E11Rik (NM_197994.1,515-533).
cttacgagtttggtttgaa

SEQ ID NO: 810951 - DNA, 19 bp, Mus musculus
  siRNA target sequence for 2210408E11Rik (NM_197994.1,527-545).
gtttgaaaactctttcact

SEQ ID NO: 810952 - DNA, 19 bp, Mus musculus
  siRNA target sequence for 2700063A19Rik (NM_197996.1,191-209).
gcagagcggcagaaataca

SEQ ID NO: 810953 - DNA, 19 bp, Mus musculus
  siRNA target sequence for 2700063A19Rik (NM_197996.1,326-344).
ctgcagtcgtttatgtata

SEQ ID NO: 810954 - DNA, 19 bp, Mus musculus
  siRNA target sequence for 2700063A19Rik (NM_197996.1,380-398).
ggcatagtggctttgatct

SEQ ID NO: 810955 - DNA, 19 bp, Mus musculus
  siRNA target sequence for 2700063A19Rik (NM_197996.1,381-399).
gcatagtggctttgatctt

SEQ ID NO: 810956 - DNA, 19 bp, Mus musculus
  siRNA target sequence for 2700063A19Rik (NM_197996.1,397-415).
cttccggaaccagactatt

SEQ ID NO: 810957 - DNA, 19 bp, Mus musculus
  siRNA target sequence for 2700063A19Rik (NM_197996.1,401-419).
cggaaccagactattgact

SEQ ID NO: 810958 - DNA, 19 bp, Mus musculus
  siRNA target sequence for 2700063A19Rik (NM_197996.1,402-420).
ggaaccagactattgactt

SEQ ID NO: 810959 - DNA, 19 bp, Mus musculus
  siRNA target sequence for 2700063A19Rik (NM_197996.1,438-456).
ggagaggaatcgagaatta

SEQ ID NO: 810960 - DNA, 19 bp, Mus musculus
  siRNA target sequence for 2700063A19Rik (NM_197996.1,441-459).
gaggaatcgagaattacta

SEQ ID NO: 810961 - DNA, 19 bp, Mus musculus
  siRNA target sequence for 2700063A19Rik (NM_197996.1,534-552).
gagactggagcaaaaacca

SEQ ID NO: 810962 - DNA, 19 bp, Mus musculus
  siRNA target sequence for 4930422G04Rik (NM_197997.1,175-193).
cacaaacccgttctgttaa

SEQ ID NO: 810963 - DNA, 19 bp, Mus musculus
  siRNA target sequence for 4930422G04Rik (NM_197997.1,177-195).
caaacccgttctgttaaga

SEQ ID NO: 810964 - DNA, 19 bp, Mus musculus
  siRNA target sequence for 4930422G04Rik (NM_197997.1,217-235).
gcgatcagtgccatagcta

SEQ ID NO: 810965 - DNA, 19 bp, Mus musculus
  siRNA target sequence for 4930422G04Rik (NM_197997.1,218-236).
cgatcagtgccatagctaa

SEQ ID NO: 810966 - DNA, 19 bp, Mus musculus
  siRNA target sequence for 4930422G04Rik (NM_197997.1,219-237).
gatcagtgccatagctaat

SEQ ID NO: 810967 - DNA, 19 bp, Mus musculus
  siRNA target sequence for 4930422G04Rik (NM_197997.1,222-240).
cagtgccatagctaatgat

SEQ ID NO: 810968 - DNA, 19 bp, Mus musculus
  siRNA target sequence for 4930422G04Rik (NM_197997.1,227-245).
ccatagctaatgatctgtt

SEQ ID NO: 810969 - DNA, 19 bp, Mus musculus
  siRNA target sequence for 4930422G04Rik (NM_197997.1,309-327).
gcccacgctgtgtttctat

SEQ ID NO: 810970 - DNA, 19 bp, Mus musculus
  siRNA target sequence for 4930422G04Rik (NM_197997.1,310-328).
cccacgctgtgtttctata

SEQ ID NO: 810971 - DNA, 19 bp, Mus musculus
  siRNA target sequence for 4930422G04Rik (NM_197997.1,441-459).
catgattggggtgataaca

SEQ ID NO: 810972 - DNA, 19 bp, Mus musculus
  siRNA target sequence for 4930422G04Rik (NM_197997.1,444-462).
gattggggtgataacatta

SEQ ID NO: 810973 - DNA, 19 bp, Mus musculus
  siRNA target sequence for 4930422G04Rik (NM_197997.1,468-486).
gtcgcagatgtacaagatt

SEQ ID NO: 810974 - DNA, 19 bp, Mus musculus
  siRNA target sequence for 4930422G04Rik (NM_197997.1,477-495).
gtacaagatttgcaattta

SEQ ID NO: 810975 - DNA, 19 bp, Mus musculus
  siRNA target sequence for 4930422G04Rik (NM_197997.1,562-580).
cagggtgccgagaaggaaa

SEQ ID NO: 810976 - DNA, 19 bp, Mus musculus
  siRNA target sequence for 4930422G04Rik (NM_197997.1,568-586).
gccgagaaggaaatcacta

SEQ ID NO: 810977 - DNA, 19 bp, Mus musculus
  siRNA target sequence for 4930422G04Rik (NM_197997.1,569-587).
ccgagaaggaaatcactat

SEQ ID NO: 810978 - DNA, 19 bp, Mus musculus
  siRNA target sequence for 4930422G04Rik (NM_197997.1,618-636).
gttcattgactcagagaaa

SEQ ID NO: 810979 - DNA, 19 bp, Mus musculus
  siRNA target sequence for 4930422G04Rik (NM_197997.1,661-679).
ggaaggagacacttattga

SEQ ID NO: 810980 - DNA, 19 bp, Mus musculus
  siRNA target sequence for 4930422G04Rik (NM_197997.1,662-680).
gaaggagacacttattgat

SEQ ID NO: 810981 - DNA, 19 bp, Mus musculus
  siRNA target sequence for 4930422G04Rik (NM_197997.1,666-684).
gagacacttattgattgta

SEQ ID NO: 810982 - DNA, 19 bp, Mus musculus
  siRNA target sequence for 4930422G04Rik (NM_197997.1,787-805).
cagctggaccatcttctta

SEQ ID NO: 810983 - DNA, 19 bp, Mus musculus
  siRNA target sequence for 4930422G04Rik (NM_197997.1,789-807).
gctggaccatcttcttaaa

SEQ ID NO: 810984 - DNA, 19 bp, Mus musculus
  siRNA target sequence for 2210021J22Rik (NM_197998.1,193-211).
cccctgggcacgtttgagt

SEQ ID NO: 810985 - DNA, 19 bp, Mus musculus
  siRNA target sequence for 2210021J22Rik (NM_197998.1,213-231).
ccagctttgtgccttatca

SEQ ID NO: 810986 - DNA, 19 bp, Mus musculus
  siRNA target sequence for 2210021J22Rik (NM_197998.1,289-307).
gaggagagctacatcatga

SEQ ID NO: 810987 - DNA, 19 bp, Mus musculus
  siRNA target sequence for 2210021J22Rik (NM_197998.1,291-309).
ggagagctacatcatgaaa

SEQ ID NO: 810988 - DNA, 19 bp, Mus musculus
  siRNA target sequence for 2210023G05Rik (NM_197999.1,332-350).
ccatttgtccacaaaatgt

SEQ ID NO: 810989 - DNA, 19 bp, Mus musculus
  siRNA target sequence for 2210023G05Rik (NM_197999.1,338-356).
gtccacaaaatgttacgat

SEQ ID NO: 810990 - DNA, 19 bp, Mus musculus
  siRNA target sequence for 2210023G05Rik (NM_197999.1,343-361).
caaaatgttacgatgaata

SEQ ID NO: 810991 - DNA, 19 bp, Mus musculus
  siRNA target sequence for 2210023G05Rik (NM_197999.1,823-841).
ctgttgcctggaaccatat

SEQ ID NO: 810992 - DNA, 19 bp, Mus musculus
  siRNA target sequence for 2210023G05Rik (NM_197999.1,829-847).
cctggaaccatatttagct

SEQ ID NO: 810993 - DNA, 19 bp, Mus musculus
  siRNA target sequence for 2210023G05Rik (NM_197999.1,830-848).
ctggaaccatatttagctt

SEQ ID NO: 810994 - DNA, 19 bp, Mus musculus
  siRNA target sequence for 2210023G05Rik (NM_197999.1,845-863).
gcttctctgaggtggttta

SEQ ID NO: 810995 - DNA, 19 bp, Mus musculus
  siRNA target sequence for 2210023G05Rik (NM_197999.1,943-961).
gaggagattctagctatta

SEQ ID NO: 810996 - DNA, 19 bp, Mus musculus
  siRNA target sequence for 2210023G05Rik (NM_197999.1,952-970).
ctagctattagcaagaact

SEQ ID NO: 810997 - DNA, 19 bp, Mus musculus
  siRNA target sequence for 2210023G05Rik (NM_197999.1,1094-1112).
ggatcgtccccaaagtcat

SEQ ID NO: 810998 - DNA, 19 bp, Mus musculus
  siRNA target sequence for 2210023G05Rik (NM_197999.1,1095-1113).
gatcgtccccaaagtcata

SEQ ID NO: 810999 - DNA, 19 bp, Mus musculus
  siRNA target sequence for 2210023G05Rik (NM_197999.1,1246-1264).
gaccccaagactcttcaaa

SEQ ID NO: 811000 - DNA, 19 bp, Mus musculus
  siRNA target sequence for 2210023G05Rik (NM_197999.1,1307-1325).
cttctctccaagtagcata

SEQ ID NO: 811001 - DNA, 19 bp, Mus musculus
  siRNA target sequence for 2210023G05Rik (NM_197999.1,1706-1724).
ctcaaaacgtgcacaaaga

SEQ ID NO: 811002 - DNA, 19 bp, Mus musculus
  siRNA target sequence for 1700113K14Rik (NM_198000.1,270-288).
ccgtgtggggcgagatgta

SEQ ID NO: 811003 - DNA, 19 bp, Mus musculus
  siRNA target sequence for 1700113K14Rik (NM_198000.1,588-606).
ccctaggagtacatcaaat

SEQ ID NO: 811004 - DNA, 19 bp, Mus musculus
  siRNA target sequence for 1700113K14Rik (NM_198000.1,590-608).
ctaggagtacatcaaatca

SEQ ID NO: 811005 - DNA, 19 bp, Mus musculus
  siRNA target sequence for 1700113K14Rik (NM_198000.1,649-667).
gacctgtgggacaaaccat

SEQ ID NO: 811006 - DNA, 19 bp, Mus musculus
  siRNA target sequence for 1700113K14Rik (NM_198000.1,788-806).
gtcccttccgggtacgatt

SEQ ID NO: 811007 - DNA, 19 bp, Mus musculus
  siRNA target sequence for 1700113K14Rik (NM_198000.1,856-874).
cgtgcagtccggcagaata

SEQ ID NO: 811008 - DNA, 19 bp, Mus musculus
  siRNA target sequence for 1700113K14Rik (NM_198000.1,859-877).
gcagtccggcagaatatct

SEQ ID NO: 811009 - DNA, 19 bp, Mus musculus
  siRNA target sequence for 1700113K14Rik (NM_198000.1,1140-1158).
cctggacacccctaacaat

SEQ ID NO: 811010 - DNA, 19 bp, Mus musculus
  siRNA target sequence for 1300003B13Rik (NM_198003.1,745-763).
gtccaccagcatttgaata

SEQ ID NO: 811011 - DNA, 19 bp, Mus musculus
  siRNA target sequence for 1300003B13Rik (NM_198003.1,807-825).
ccatgcatccacccaaaat

SEQ ID NO: 811012 - DNA, 19 bp, Mus musculus
  siRNA target sequence for 1300003B13Rik (NM_198003.1,827-845).
gtccttataaaattaacct

SEQ ID NO: 811013 - DNA, 19 bp, Mus musculus
  siRNA target sequence for 1300003B13Rik (NM_198003.1,843-861).
cctcagagatacaactgtt

SEQ ID NO: 811014 - DNA, 19 bp, Mus musculus
  siRNA target sequence for 1300003B13Rik (NM_198003.1,1001-1019).
gtacagagtttgataagat

SEQ ID NO: 811015 - DNA, 19 bp, Mus musculus
  siRNA target sequence for 1300003B13Rik (NM_198003.1,1106-1124).
cccagctatgcgatcttaa

SEQ ID NO: 811016 - DNA, 19 bp, Mus musculus
  siRNA target sequence for 1300003B13Rik (NM_198003.1,1107-1125).
ccagctatgcgatcttaaa

SEQ ID NO: 811017 - DNA, 19 bp, Mus musculus
  siRNA target sequence for 1300003B13Rik (NM_198003.1,1108-1126).
cagctatgcgatcttaaaa

SEQ ID NO: 811018 - DNA, 19 bp, Mus musculus
  siRNA target sequence for 1300003B13Rik (NM_198003.1,1110-1128).
gctatgcgatcttaaaagt

SEQ ID NO: 811019 - DNA, 19 bp, Mus musculus
  siRNA target sequence for 1300003B13Rik (NM_198003.1,1213-1231).
catcagccagttcatacaa

SEQ ID NO: 811020 - DNA, 19 bp, Mus musculus
  siRNA target sequence for 5133401N09Rik (NM_198004.1,41-59).
gtgagcggctccggaaaat

SEQ ID NO: 811021 - DNA, 19 bp, Mus musculus
  siRNA target sequence for 5133401N09Rik (NM_198004.1,126-144).
ccgaggagaatcggataaa

SEQ ID NO: 811022 - DNA, 19 bp, Mus musculus
  siRNA target sequence for 5133401N09Rik (NM_198004.1,195-213).
gcaccttgcacgacatttt

SEQ ID NO: 811023 - DNA, 19 bp, Mus musculus
  siRNA target sequence for 5133401N09Rik (NM_198004.1,198-216).
ccttgcacgacattttact

SEQ ID NO: 811024 - DNA, 19 bp, Mus musculus
  siRNA target sequence for 5133401N09Rik (NM_198004.1,199-217).
cttgcacgacattttacta

SEQ ID NO: 811025 - DNA, 19 bp, Mus musculus
  siRNA target sequence for 5133401N09Rik (NM_198004.1,202-220).
gcacgacattttactaaga

SEQ ID NO: 811026 - DNA, 19 bp, Mus musculus
  siRNA target sequence for 5133401N09Rik (NM_198004.1,205-223).
cgacattttactaagagat

SEQ ID NO: 811027 - DNA, 19 bp, Mus musculus
  siRNA target sequence for 5133401N09Rik (NM_198004.1,258-276).
cagctctgaagaaaacgta

SEQ ID NO: 811028 - DNA, 19 bp, Mus musculus
  siRNA target sequence for 5133401N09Rik (NM_198004.1,289-307).
gatccgaggaggaagtgat

SEQ ID NO: 811029 - DNA, 19 bp, Mus musculus
  siRNA target sequence for 5133401N09Rik (NM_198004.1,374-392).
ctctgcggctcgtttgaca

SEQ ID NO: 811030 - DNA, 19 bp, Mus musculus
  siRNA target sequence for 5133401N09Rik (NM_198004.1,378-396).
gcggctcgtttgacatcat

SEQ ID NO: 811031 - DNA, 19 bp, Mus musculus
  siRNA target sequence for 5133401N09Rik (NM_198004.1,379-397).
cggctcgtttgacatcatt

SEQ ID NO: 811032 - DNA, 19 bp, Mus musculus
  siRNA target sequence for 5133401N09Rik (NM_198004.1,382-400).
ctcgtttgacatcatttat

SEQ ID NO: 811033 - DNA, 19 bp, Mus musculus
  siRNA target sequence for 5133401N09Rik (NM_198004.1,401-419).
ggacgcttgctccaaagaa

SEQ ID NO: 811034 - DNA, 19 bp, Mus musculus
  siRNA target sequence for 5133401N09Rik (NM_198004.1,402-420).
gacgcttgctccaaagaaa

SEQ ID NO: 811035 - DNA, 19 bp, Mus musculus
  siRNA target sequence for 5133401N09Rik (NM_198004.1,448-466).
gcagtcccagtttagtatt

SEQ ID NO: 811036 - DNA, 19 bp, Mus musculus
  siRNA target sequence for 5133401N09Rik (NM_198004.1,477-495).
catcagctcccgaaaactt

SEQ ID NO: 811037 - DNA, 19 bp, Mus musculus
  siRNA target sequence for 5133401N09Rik (NM_198004.1,500-518).
caagtcagcgtggacaaaa

SEQ ID NO: 811038 - DNA, 19 bp, Mus musculus
  siRNA target sequence for 5133401N09Rik (NM_198004.1,532-550).
caccgctgccgttatggaa

SEQ ID NO: 811039 - DNA, 19 bp, Mus musculus
  siRNA target sequence for 4833418A01Rik (NM_198005.1,260-278).
gtgtgccaggagagtacta

SEQ ID NO: 811040 - DNA, 19 bp, Mus musculus
  siRNA target sequence for 4833418A01Rik (NM_198005.1,262-280).
gtgccaggagagtactaaa

SEQ ID NO: 811041 - DNA, 19 bp, Mus musculus
  siRNA target sequence for 4833418A01Rik (NM_198005.1,264-282).
gccaggagagtactaaatt

SEQ ID NO: 811042 - DNA, 19 bp, Mus musculus
  siRNA target sequence for 4833418A01Rik (NM_198005.1,265-283).
ccaggagagtactaaattt

SEQ ID NO: 811043 - DNA, 19 bp, Mus musculus
  siRNA target sequence for 4833418A01Rik (NM_198005.1,273-291).
gtactaaatttaagaatgt

SEQ ID NO: 811044 - DNA, 19 bp, Mus musculus
  siRNA target sequence for 4833418A01Rik (NM_198005.1,286-304).
gaatgtttggacaactcat

SEQ ID NO: 811045 - DNA, 19 bp, Mus musculus
  siRNA target sequence for 4833418A01Rik (NM_198005.1,476-494).
cctgacccatcagactata

SEQ ID NO: 811046 - DNA, 19 bp, Mus musculus
  siRNA target sequence for 4833418A01Rik (NM_198005.1,482-500).
ccatcagactataaatcct

SEQ ID NO: 811047 - DNA, 19 bp, Mus musculus
  siRNA target sequence for 4833418A01Rik (NM_198005.1,509-527).
gccctgactgctcataatt

SEQ ID NO: 811048 - DNA, 19 bp, Mus musculus
  siRNA target sequence for 4833418A01Rik (NM_198005.1,562-580).
cctggagaaaatatacctt

SEQ ID NO: 811049 - DNA, 19 bp, Mus musculus
  siRNA target sequence for 4833418A01Rik (NM_198005.1,690-708).
caccacccgttttgttgta

SEQ ID NO: 811050 - DNA, 19 bp, Mus musculus
  siRNA target sequence for 4833418A01Rik (NM_198005.1,721-739).
ccgggttctgcccttttca

SEQ ID NO: 811051 - DNA, 19 bp, Mus musculus
  siRNA target sequence for 4833418A01Rik (NM_198005.1,738-756).
cacttgtagggattctaga

SEQ ID NO: 811052 - DNA, 19 bp, Mus musculus
  siRNA target sequence for 4833418A01Rik (NM_198005.1,747-765).
ggattctagagatcaacaa

SEQ ID NO: 811053 - DNA, 19 bp, Mus musculus
  siRNA target sequence for 4833418A01Rik (NM_198005.1,748-766).
gattctagagatcaacaaa

SEQ ID NO: 811054 - DNA, 19 bp, Mus musculus
  siRNA target sequence for 4833418A01Rik (NM_198005.1,755-773).
gagatcaacaaaaaggttt

SEQ ID NO: 811055 - DNA, 19 bp, Mus musculus
  siRNA target sequence for 4833418A01Rik (NM_198005.1,792-810).
ctaccttgtcacatggaat

SEQ ID NO: 811056 - DNA, 19 bp, Mus musculus
  siRNA target sequence for 4833418A01Rik (NM_198005.1,803-821).
catggaatcctgattgtga

SEQ ID NO: 811057 - DNA, 19 bp, Mus musculus
  siRNA target sequence for 4833418A01Rik (NM_198005.1,944-962).
gctccttttggcattcctt

SEQ ID NO: 811058 - DNA, 19 bp, Mus musculus
  siRNA target sequence for 4833418A01Rik (NM_198005.1,948-966).
cttttggcattccttgtaa

SEQ ID NO: 811059 - DNA, 19 bp, Mus musculus
  siRNA target sequence for 4833418A01Rik (NM_198005.1,954-972).
gcattccttgtaatgttaa

SEQ ID NO: 811060 - DNA, 19 bp, Mus musculus
  siRNA target sequence for 4833418A01Rik (NM_198005.1,955-973).
cattccttgtaatgttaaa

SEQ ID NO: 811061 - DNA, 19 bp, Mus musculus
  siRNA target sequence for 4833418A01Rik (NM_198005.1,992-1010).
ccactctttgaagtttcat

SEQ ID NO: 811062 - DNA, 19 bp, Mus musculus
  siRNA target sequence for 4833418A01Rik (NM_198005.1,1043-1061).
ccttggcactacatcatca

SEQ ID NO: 811063 - DNA, 19 bp, Mus musculus
  siRNA target sequence for 4833418A01Rik (NM_198005.1,1060-1078).
cacgcctaataagaagaaa

SEQ ID NO: 811064 - DNA, 19 bp, Mus musculus
  siRNA target sequence for 4833418A01Rik (NM_198005.1,1062-1080).
cgcctaataagaagaaaca

SEQ ID NO: 811065 - DNA, 19 bp, Mus musculus
  siRNA target sequence for 4833418A01Rik (NM_198005.1,1079-1097).
cagaaaggagtttttcata

SEQ ID NO: 811066 - DNA, 19 bp, Mus musculus
  siRNA target sequence for 4833418A01Rik (NM_198005.1,1081-1099).
gaaaggagtttttcatatt

SEQ ID NO: 811067 - DNA, 19 bp, Mus musculus
  siRNA target sequence for 4833418A01Rik (NM_198005.1,1147-1165).
ggagtgctgttcattagaa

SEQ ID NO: 811068 - DNA, 19 bp, Mus musculus
  siRNA target sequence for 4833418A01Rik (NM_198005.1,1148-1166).
gagtgctgttcattagaat

SEQ ID NO: 811069 - DNA, 19 bp, Mus musculus
  siRNA target sequence for 4833418A01Rik (NM_198005.1,1152-1170).
gctgttcattagaatctga

SEQ ID NO: 811070 - DNA, 19 bp, Mus musculus
  siRNA target sequence for 4833418A01Rik (NM_198005.1,1167-1185).
ctgactggatctatttcca

SEQ ID NO: 811071 - DNA, 19 bp, Mus musculus
  siRNA target sequence for 4833418A01Rik (NM_198005.1,1197-1215).
ctggaagaataatacatgt

SEQ ID NO: 811072 - DNA, 19 bp, Mus musculus
  siRNA target sequence for 4833418A01Rik (NM_198005.1,1221-1239).
caaaccaagtcaaagtctt

SEQ ID NO: 811073 - DNA, 19 bp, Mus musculus
  siRNA target sequence for 4833418A01Rik (NM_198005.1,1229-1247).
gtcaaagtcttgaagctaa

SEQ ID NO: 811074 - DNA, 19 bp, Mus musculus
  siRNA target sequence for 4833418A01Rik (NM_198005.1,1517-1535).
ggaaccttactcaaaagca

SEQ ID NO: 811075 - DNA, 19 bp, Mus musculus
  siRNA target sequence for 4833418A01Rik (NM_198005.1,1518-1536).
gaaccttactcaaaagcat

SEQ ID NO: 811076 - DNA, 19 bp, Mus musculus
  siRNA target sequence for 4833418A01Rik (NM_198005.1,1551-1569).
catgggatgtggtatgtat

SEQ ID NO: 811077 - DNA, 19 bp, Mus musculus
  siRNA target sequence for 4833418A01Rik (NM_198005.1,1575-1593).
ctgggacactaagttgtaa

SEQ ID NO: 811078 - DNA, 19 bp, Mus musculus
  siRNA target sequence for 4833418A01Rik (NM_198005.1,1600-1618).
cctttacaggtgccattta

SEQ ID NO: 811079 - DNA, 19 bp, Mus musculus
  siRNA target sequence for 4833418A01Rik (NM_198005.1,1630-1648).
ccatatcagtccagattca

SEQ ID NO: 811080 - DNA, 19 bp, Mus musculus
  siRNA target sequence for 6330578E17Rik (NM_198006.1,153-171).
ccccacggcagtgtttgaa

SEQ ID NO: 811081 - DNA, 19 bp, Mus musculus
  siRNA target sequence for 6330578E17Rik (NM_198006.1,193-211).
gcagtattccttttttgaa

SEQ ID NO: 811082 - DNA, 19 bp, Mus musculus
  siRNA target sequence for 6330578E17Rik (NM_198006.1,194-212).
cagtattccttttttgaat

SEQ ID NO: 811083 - DNA, 19 bp, Mus musculus
  siRNA target sequence for 2610041P08Rik (NM_198008.1,291-309).
gggctcttgctctgaagta

SEQ ID NO: 811084 - DNA, 19 bp, Mus musculus
  siRNA target sequence for 2610041P08Rik (NM_198008.1,426-444).
gacaggcctgggctgatat

SEQ ID NO: 811085 - DNA, 19 bp, Mus musculus
  siRNA target sequence for 2610041P08Rik (NM_198008.1,428-446).
caggcctgggctgatatct

SEQ ID NO: 811086 - DNA, 19 bp, Mus musculus
  siRNA target sequence for E430018J23Rik (NM_198011.1,525-543).
cgaggcaacccagaagata

SEQ ID NO: 811087 - DNA, 19 bp, Mus musculus
  siRNA target sequence for E430018J23Rik (NM_198011.1,526-544).
gaggcaacccagaagatat

SEQ ID NO: 811088 - DNA, 19 bp, Mus musculus
  siRNA target sequence for E430018J23Rik (NM_198011.1,651-669).
ggtgcacaaccctatccta

SEQ ID NO: 811089 - DNA, 19 bp, Mus musculus
  siRNA target sequence for E430018J23Rik (NM_198011.1,652-670).
gtgcacaaccctatcctaa

SEQ ID NO: 811090 - DNA, 19 bp, Mus musculus
  siRNA target sequence for E430018J23Rik (NM_198011.1,654-672).
gcacaaccctatcctaaaa

SEQ ID NO: 811091 - DNA, 19 bp, Mus musculus
  siRNA target sequence for E430018J23Rik (NM_198011.1,779-797).
cagactgcgacaagtattt

SEQ ID NO: 811092 - DNA, 19 bp, Mus musculus
  siRNA target sequence for E430018J23Rik (NM_198011.1,1518-1536).
gggcttccaacattatcca

SEQ ID NO: 811093 - DNA, 19 bp, Mus musculus
  siRNA target sequence for F730114J12Rik (NM_198012.1,294-312).
ggagagtcccagaacttga

SEQ ID NO: 811094 - DNA, 19 bp, Mus musculus
  siRNA target sequence for F730114J12Rik (NM_198012.1,400-418).
gtctgctaggcttctgtat

SEQ ID NO: 811095 - DNA, 19 bp, Mus musculus
  siRNA target sequence for F730114J12Rik (NM_198012.1,478-496).
gcaaggaggatgatatggt

SEQ ID NO: 811096 - DNA, 19 bp, Mus musculus
  siRNA target sequence for F730114J12Rik (NM_198012.1,557-575).
ggatgttgcctgggaatat

SEQ ID NO: 811097 - DNA, 19 bp, Mus musculus
  siRNA target sequence for F730114J12Rik (NM_198012.1,558-576).
gatgttgcctgggaatata

SEQ ID NO: 811098 - DNA, 19 bp, Mus musculus
  siRNA target sequence for F730114J12Rik (NM_198012.1,701-719).
catccgatgggagtttgaa

SEQ ID NO: 811099 - DNA, 19 bp, Mus musculus
  siRNA target sequence for F730114J12Rik (NM_198012.1,704-722).
ccgatgggagtttgaaaaa

SEQ ID NO: 811100 - DNA, 19 bp, Mus musculus
  siRNA target sequence for F730114J12Rik (NM_198012.1,705-723).
cgatgggagtttgaaaaat

SEQ ID NO: 811101 - DNA, 19 bp, Mus musculus
  siRNA target sequence for F730114J12Rik (NM_198012.1,869-887).
ggtcctgtggagcatgatt

SEQ ID NO: 811102 - DNA, 19 bp, Mus musculus
  siRNA target sequence for F730114J12Rik (NM_198012.1,925-943).
ggatgctgcagggtattca

SEQ ID NO: 811103 - DNA, 19 bp, Mus musculus
  siRNA target sequence for F730114J12Rik (NM_198012.1,1093-1111).
cccgccttgtcgtttccaa

SEQ ID NO: 811104 - DNA, 19 bp, Mus musculus
  siRNA target sequence for F730114J12Rik (NM_198012.1,1365-1383).
cgcgcaggcacagatgaat

SEQ ID NO: 811105 - DNA, 19 bp, Mus musculus
  siRNA target sequence for F730114J12Rik (NM_198012.1,1366-1384).
gcgcaggcacagatgaata

SEQ ID NO: 811106 - DNA, 19 bp, Mus musculus
  siRNA target sequence for F730114J12Rik (NM_198012.1,1408-1426).
ctccgcaccgggtaggaat

SEQ ID NO: 811107 - DNA, 19 bp, Mus musculus
  siRNA target sequence for F730114J12Rik (NM_198012.1,1476-1494).
ggtgcctcccacattttca

SEQ ID NO: 811108 - DNA, 19 bp, Mus musculus
  siRNA target sequence for F730114J12Rik (NM_198012.1,1519-1537).
gccgtctcttgccctattt

SEQ ID NO: 811109 - DNA, 19 bp, Mus musculus
  siRNA target sequence for F730114J12Rik (NM_198012.1,1521-1539).
cgtctcttgccctatttca

SEQ ID NO: 811110 - DNA, 19 bp, Mus musculus
  siRNA target sequence for F730114J12Rik (NM_198012.1,1542-1560).
ccttgctacagcattgaca

SEQ ID NO: 811111 - DNA, 19 bp, Mus musculus
  siRNA target sequence for F730114J12Rik (NM_198012.1,1550-1568).
cagcattgacactaacaat

SEQ ID NO: 811112 - DNA, 19 bp, Mus musculus
  siRNA target sequence for F730114J12Rik (NM_198012.1,1571-1589).
cactccactcaccatttgt

SEQ ID NO: 811113 - DNA, 19 bp, Mus musculus
  siRNA target sequence for C330016O16Rik (NM_198013.1,497-515).
cccctcaggagctcaacaa

SEQ ID NO: 811114 - DNA, 19 bp, Mus musculus
  siRNA target sequence for C330016O16Rik (NM_198013.1,565-583).
gacgacttcaagactatgt

SEQ ID NO: 811115 - DNA, 19 bp, Mus musculus
  siRNA target sequence for C330016O16Rik (NM_198013.1,595-613).
gactacgacatcattgagt

SEQ ID NO: 811116 - DNA, 19 bp, Mus musculus
  siRNA target sequence for C330016O16Rik (NM_198013.1,650-668).
ccatagaccagctgttaca

SEQ ID NO: 811117 - DNA, 19 bp, Mus musculus
  siRNA target sequence for C330016O16Rik (NM_198013.1,858-876).
cccacctccccggattgat

SEQ ID NO: 811118 - DNA, 19 bp, Mus musculus
  siRNA target sequence for C330016O16Rik (NM_198013.1,860-878).
cacctccccggattgatgt

SEQ ID NO: 811119 - DNA, 19 bp, Mus musculus
  siRNA target sequence for C330016O16Rik (NM_198013.1,1182-1200).
ggagagagaccgattgaaa

SEQ ID NO: 811120 - DNA, 19 bp, Mus musculus
  siRNA target sequence for C330016O16Rik (NM_198013.1,1185-1203).
gagagaccgattgaaatat

SEQ ID NO: 811121 - DNA, 19 bp, Mus musculus
  siRNA target sequence for C330016O16Rik (NM_198013.1,1187-1205).
gagaccgattgaaatatga

SEQ ID NO: 811122 - DNA, 19 bp, Mus musculus
  siRNA target sequence for C330016O16Rik (NM_198013.1,1189-1207).
gaccgattgaaatatgaat

SEQ ID NO: 811123 - DNA, 19 bp, Mus musculus
  siRNA target sequence for C330016O16Rik (NM_198013.1,1267-1285).
gtccccggaaccagtgaaa

SEQ ID NO: 811124 - DNA, 19 bp, Mus musculus
  siRNA target sequence for C330016O16Rik (NM_198013.1,1271-1289).
ccggaaccagtgaaaccaa

SEQ ID NO: 811125 - DNA, 19 bp, Mus musculus
  siRNA target sequence for C330016O16Rik (NM_198013.1,1319-1337).
gggacaagttgaaacacat

SEQ ID NO: 811126 - DNA, 19 bp, Mus musculus
  siRNA target sequence for 9630044O09Rik (NM_198014.1,694-712).
ctatgtgagcccaactgtt

SEQ ID NO: 811127 - DNA, 19 bp, Mus musculus
  siRNA target sequence for 9630044O09Rik (NM_198014.1,758-776).
ggcagcggcatgcctttat

SEQ ID NO: 811128 - DNA, 19 bp, Mus musculus
  siRNA target sequence for 9630044O09Rik (NM_198014.1,777-795).
ccaatggcacgcagttata

SEQ ID NO: 811129 - DNA, 19 bp, Mus musculus
  siRNA target sequence for 9630044O09Rik (NM_198014.1,778-796).
caatggcacgcagttatat

SEQ ID NO: 811130 - DNA, 19 bp, Mus musculus
  siRNA target sequence for 9630044O09Rik (NM_198014.1,782-800).
ggcacgcagttatattcca

SEQ ID NO: 811131 - DNA, 19 bp, Mus musculus
  siRNA target sequence for 9630044O09Rik (NM_198014.1,808-826).
catccctactccgaacaaa

SEQ ID NO: 811132 - DNA, 19 bp, Mus musculus
  siRNA target sequence for 9630044O09Rik (NM_198014.1,867-885).
gaccttcactggcaataaa

SEQ ID NO: 811133 - DNA, 19 bp, Mus musculus
  siRNA target sequence for 1600010O03Rik (NM_198016.1,173-191).
caacgggattcaatcaact

SEQ ID NO: 811134 - DNA, 19 bp, Mus musculus
  siRNA target sequence for C430003P19Rik (NM_198017.1,192-210).
ctctaccgccaacaattct

SEQ ID NO: 811135 - DNA, 19 bp, Mus musculus
  siRNA target sequence for C430003P19Rik (NM_198017.1,198-216).
cgccaacaattctactcat

SEQ ID NO: 811136 - DNA, 19 bp, Mus musculus
  siRNA target sequence for C430003P19Rik (NM_198017.1,204-222).
caattctactcatgcttta

SEQ ID NO: 811137 - DNA, 19 bp, Mus musculus
  siRNA target sequence for C430003P19Rik (NM_198017.1,209-227).
ctactcatgctttagaata

SEQ ID NO: 811138 - DNA, 19 bp, Mus musculus
  siRNA target sequence for C430003P19Rik (NM_198017.1,212-230).
ctcatgctttagaatatgt

SEQ ID NO: 811139 - DNA, 19 bp, Mus musculus
  siRNA target sequence for C430003P19Rik (NM_198017.1,239-257).
gaccaaaccgcaggtataa

SEQ ID NO: 811140 - DNA, 19 bp, Mus musculus
  siRNA target sequence for C430003P19Rik (NM_198017.1,242-260).
caaaccgcaggtataatca

SEQ ID NO: 811141 - DNA, 19 bp, Mus musculus
  siRNA target sequence for C430003P19Rik (NM_198017.1,252-270).
gtataatcaaaggatatca

SEQ ID NO: 811142 - DNA, 19 bp, Mus musculus
  siRNA target sequence for C430003P19Rik (NM_198017.1,280-298).
cccaatctaggcaatacta

SEQ ID NO: 811143 - DNA, 19 bp, Mus musculus
  siRNA target sequence for C430003P19Rik (NM_198017.1,329-347).
caaacacgtctcagagtta

SEQ ID NO: 811144 - DNA, 19 bp, Mus musculus
  siRNA target sequence for C430003P19Rik (NM_198017.1,364-382).
gagcacggtactgactttt

SEQ ID NO: 811145 - DNA, 19 bp, Mus musculus
  siRNA target sequence for C430003P19Rik (NM_198017.1,366-384).
gcacggtactgactttttt

SEQ ID NO: 811146 - DNA, 19 bp, Mus musculus
  siRNA target sequence for C430003P19Rik (NM_198017.1,405-423).
ggacatcagggcaatttat

SEQ ID NO: 811147 - DNA, 19 bp, Mus musculus
  siRNA target sequence for C430003P19Rik (NM_198017.1,413-431).
gggcaatttatcaggttta

SEQ ID NO: 811148 - DNA, 19 bp, Mus musculus
  siRNA target sequence for C430003P19Rik (NM_198017.1,414-432).
ggcaatttatcaggtttat

SEQ ID NO: 811149 - DNA, 19 bp, Mus musculus
  siRNA target sequence for C430003P19Rik (NM_198017.1,416-434).
caatttatcaggtttataa

SEQ ID NO: 811150 - DNA, 19 bp, Mus musculus
  siRNA target sequence for C430003P19Rik (NM_198017.1,447-465).
gaaagtacaggcagtatgt

SEQ ID NO: 811151 - DNA, 19 bp, Mus musculus
  siRNA target sequence for C430003P19Rik (NM_198017.1,456-474).
ggcagtatgtgcagatgta

SEQ ID NO: 811152 - DNA, 19 bp, Mus musculus
  siRNA target sequence for C430003P19Rik (NM_198017.1,460-478).
gtatgtgcagatgtagaaa

SEQ ID NO: 811153 - DNA, 19 bp, Mus musculus
  siRNA target sequence for C430003P19Rik (NM_198017.1,480-498).
gagtgagcgagttgttgaa

SEQ ID NO: 811154 - DNA, 19 bp, Mus musculus
  siRNA target sequence for C430003P19Rik (NM_198017.1,484-502).
gagcgagttgttgaatctt

SEQ ID NO: 811155 - DNA, 19 bp, Mus musculus
  siRNA target sequence for C430003P19Rik (NM_198017.1,486-504).
gcgagttgttgaatcttgt

SEQ ID NO: 811156 - DNA, 19 bp, Mus musculus
  siRNA target sequence for C430003P19Rik (NM_198017.1,503-521).
gtcaggcagaagtgaacaa

SEQ ID NO: 811157 - DNA, 19 bp, Mus musculus
  siRNA target sequence for C430003P19Rik (NM_198017.1,633-651).
ccctcggatgtcctattct

SEQ ID NO: 811158 - DNA, 19 bp, Mus musculus
  siRNA target sequence for C430003P19Rik (NM_198017.1,642-660).
gtcctattctgggttttca

SEQ ID NO: 811159 - DNA, 19 bp, Mus musculus
  siRNA target sequence for C430003P19Rik (NM_198017.1,729-747).
cccaaacaatcaagaaagt

SEQ ID NO: 811160 - DNA, 19 bp, Mus musculus
  siRNA target sequence for C430003P19Rik (NM_198017.1,730-748).
ccaaacaatcaagaaagta

SEQ ID NO: 811161 - DNA, 19 bp, Mus musculus
  siRNA target sequence for C430003P19Rik (NM_198017.1,827-845).
ccagtggcggactgaagtt

SEQ ID NO: 811162 - DNA, 19 bp, Mus musculus
  siRNA target sequence for C430003P19Rik (NM_198017.1,951-969).
ccctcatagcgaatactca

SEQ ID NO: 811163 - DNA, 19 bp, Mus musculus
  siRNA target sequence for C430003P19Rik (NM_198017.1,955-973).
catagcgaatactcacatt

SEQ ID NO: 811164 - DNA, 19 bp, Mus musculus
  siRNA target sequence for C430003P19Rik (NM_198017.1,959-977).
gcgaatactcacattcaaa

SEQ ID NO: 811165 - DNA, 19 bp, Mus musculus
  siRNA target sequence for C430003P19Rik (NM_198017.1,966-984).
ctcacattcaaagaattca

SEQ ID NO: 811166 - DNA, 19 bp, Mus musculus
  siRNA target sequence for Abr (NM_198018.1,588-606).
ccagtgaagagatctacat

SEQ ID NO: 811167 - DNA, 19 bp, Mus musculus
  siRNA target sequence for Abr (NM_198018.1,589-607).
cagtgaagagatctacatt

SEQ ID NO: 811168 - DNA, 19 bp, Mus musculus
  siRNA target sequence for Abr (NM_198018.1,822-840).
gccagcttggcgtgtacaa

SEQ ID NO: 811169 - DNA, 19 bp, Mus musculus
  siRNA target sequence for Abr (NM_198018.1,827-845).
cttggcgtgtacaaagcat

SEQ ID NO: 811170 - DNA, 19 bp, Mus musculus
  siRNA target sequence for Abr (NM_198018.1,1097-1115).
ctccgcatctcccagaatt

SEQ ID NO: 811171 - DNA, 19 bp, Mus musculus
  siRNA target sequence for Abr (NM_198018.1,1234-1252).
gaagctgcggcatgtcttt

SEQ ID NO: 811172 - DNA, 19 bp, Mus musculus
  siRNA target sequence for Abr (NM_198018.1,1238-1256).
ctgcggcatgtctttctct

SEQ ID NO: 811173 - DNA, 19 bp, Mus musculus
  siRNA target sequence for Abr (NM_198018.1,1302-1320).
gaaagcatcagcagtatga

SEQ ID NO: 811174 - DNA, 19 bp, Mus musculus
  siRNA target sequence for Abr (NM_198018.1,1415-1433).
ctcgaggacatgaaaacga

SEQ ID NO: 811175 - DNA, 19 bp, Mus musculus
  siRNA target sequence for Abr (NM_198018.1,1421-1439).
gacatgaaaacgaagatct

SEQ ID NO: 811176 - DNA, 19 bp, Mus musculus
  siRNA target sequence for Abr (NM_198018.1,1519-1537).
gtttgagaatgagttctta

SEQ ID NO: 811177 - DNA, 19 bp, Mus musculus
  siRNA target sequence for Abr (NM_198018.1,1561-1579).
ccctttccggatacacaat

SEQ ID NO: 811178 - DNA, 19 bp, Mus musculus
  siRNA target sequence for Abr (NM_198018.1,1587-1605).
gaaagagttacctgtttct

SEQ ID NO: 811179 - DNA, 19 bp, Mus musculus
  siRNA target sequence for Abr (NM_198018.1,1709-1727).
ctcacgggatcctgtttca

SEQ ID NO: 811180 - DNA, 19 bp, Mus musculus
  siRNA target sequence for Abr (NM_198018.1,1823-1841).
gccaagggctttaaacagt

SEQ ID NO: 811181 - DNA, 19 bp, Mus musculus
  siRNA target sequence for Abr (NM_198018.1,1838-1856).
cagtcagccaatctttact

SEQ ID NO: 811182 - DNA, 19 bp, Mus musculus
  siRNA target sequence for Abr (NM_198018.1,1840-1858).
gtcagccaatctttactgt

SEQ ID NO: 811183 - DNA, 19 bp, Mus musculus
  siRNA target sequence for Abr (NM_198018.1,1977-1995).
ccctgaggatcctgtgtta

SEQ ID NO: 811184 - DNA, 19 bp, Mus musculus
  siRNA target sequence for Abr (NM_198018.1,1978-1996).
cctgaggatcctgtgttat

SEQ ID NO: 811185 - DNA, 19 bp, Mus musculus
  siRNA target sequence for Abr (NM_198018.1,2109-2127).
ggcatacggacgtgattga

SEQ ID NO: 811186 - DNA, 19 bp, Mus musculus
  siRNA target sequence for Abr (NM_198018.1,2110-2128).
gcatacggacgtgattgaa

SEQ ID NO: 811187 - DNA, 19 bp, Mus musculus
  siRNA target sequence for Abr (NM_198018.1,2111-2129).
catacggacgtgattgaaa

SEQ ID NO: 811188 - DNA, 19 bp, Mus musculus
  siRNA target sequence for Abr (NM_198018.1,2115-2133).
cggacgtgattgaaatgaa

SEQ ID NO: 811189 - DNA, 19 bp, Mus musculus
  siRNA target sequence for Abr (NM_198018.1,2116-2134).
ggacgtgattgaaatgaat

SEQ ID NO: 811190 - DNA, 19 bp, Mus musculus
  siRNA target sequence for Abr (NM_198018.1,2272-2290).
catcgtccggcaatgcata

SEQ ID NO: 811191 - DNA, 19 bp, Mus musculus
  siRNA target sequence for Abr (NM_198018.1,2275-2293).
cgtccggcaatgcatagaa

SEQ ID NO: 811192 - DNA, 19 bp, Mus musculus
  siRNA target sequence for Abr (NM_198018.1,2321-2339).
gttggcatctacaggatat

SEQ ID NO: 811193 - DNA, 19 bp, Mus musculus
  siRNA target sequence for Abr (NM_198018.1,2438-2456).
gctgggaccctcaagctat

SEQ ID NO: 811194 - DNA, 19 bp, Mus musculus
  siRNA target sequence for Abr (NM_198018.1,2439-2457).
ctgggaccctcaagctata

SEQ ID NO: 811195 - DNA, 19 bp, Mus musculus
  siRNA target sequence for Abr (NM_198018.1,2441-2459).
gggaccctcaagctatact

SEQ ID NO: 811196 - DNA, 19 bp, Mus musculus
  siRNA target sequence for Abr (NM_198018.1,2442-2460).
ggaccctcaagctatactt

SEQ ID NO: 811197 - DNA, 19 bp, Mus musculus
  siRNA target sequence for Abr (NM_198018.1,2443-2461).
gaccctcaagctatacttt

SEQ ID NO: 811198 - DNA, 19 bp, Mus musculus
  siRNA target sequence for Abr (NM_198018.1,2476-2494).
gcccctccttacagataga

SEQ ID NO: 811199 - DNA, 19 bp, Mus musculus
  siRNA target sequence for 5730599I05Rik (NM_198019.1,116-134).
ggtcgtccgcagatgaatt

SEQ ID NO: 811200 - DNA, 19 bp, Mus musculus
  siRNA target sequence for 5730599I05Rik (NM_198019.1,119-137).
cgtccgcagatgaattcca

SEQ ID NO: 811201 - DNA, 19 bp, Mus musculus
  siRNA target sequence for 5730599I05Rik (NM_198019.1,136-154).
cacggttaatacacctata

SEQ ID NO: 811202 - DNA, 19 bp, Mus musculus
  siRNA target sequence for 5730599I05Rik (NM_198019.1,138-156).
cggttaatacacctataca

SEQ ID NO: 811203 - DNA, 19 bp, Mus musculus
  siRNA target sequence for 5730599I05Rik (NM_198019.1,139-157).
ggttaatacacctatacaa

SEQ ID NO: 811204 - DNA, 19 bp, Mus musculus
  siRNA target sequence for 5730599I05Rik (NM_198019.1,147-165).
cacctatacaagaacagaa

SEQ ID NO: 811205 - DNA, 19 bp, Mus musculus
  siRNA target sequence for 5730599I05Rik (NM_198019.1,201-219).
ctgccaccggacaaatgca

SEQ ID NO: 811206 - DNA, 19 bp, Mus musculus
  siRNA target sequence for 5730599I05Rik (NM_198019.1,207-225).
ccggacaaatgcaggatat

SEQ ID NO: 811207 - DNA, 19 bp, Mus musculus
  siRNA target sequence for 5730599I05Rik (NM_198019.1,227-245).
cgatttcagaagattacca

SEQ ID NO: 811208 - DNA, 19 bp, Mus musculus
  siRNA target sequence for 5730599I05Rik (NM_198019.1,246-264).
gcgatgctctgattccttt

SEQ ID NO: 811209 - DNA, 19 bp, Mus musculus
  siRNA target sequence for 5730599I05Rik (NM_198019.1,365-383).
gcagcaggattcattgcta

SEQ ID NO: 811210 - DNA, 19 bp, Mus musculus
  siRNA target sequence for 5730599I05Rik (NM_198019.1,366-384).
cagcaggattcattgctaa

SEQ ID NO: 811211 - DNA, 19 bp, Mus musculus
  siRNA target sequence for 5730599I05Rik (NM_198019.1,602-620).
ctgcttaatgagccaatta

SEQ ID NO: 811212 - DNA, 19 bp, Mus musculus
  siRNA target sequence for 5730599I05Rik (NM_198019.1,604-622).
gcttaatgagccaattaaa

SEQ ID NO: 811213 - DNA, 19 bp, Mus musculus
  siRNA target sequence for 5730599I05Rik (NM_198019.1,611-629).
gagccaattaaaagtgaat

SEQ ID NO: 811214 - DNA, 19 bp, Mus musculus
  siRNA target sequence for 5730599I05Rik (NM_198019.1,613-631).
gccaattaaaagtgaatct

SEQ ID NO: 811215 - DNA, 19 bp, Mus musculus
  siRNA target sequence for 5730599I05Rik (NM_198019.1,675-693).
ctgtctcatctaagactat

SEQ ID NO: 811216 - DNA, 19 bp, Mus musculus
  siRNA target sequence for 5730599I05Rik (NM_198019.1,677-695).
gtctcatctaagactatca

SEQ ID NO: 811217 - DNA, 19 bp, Mus musculus
  siRNA target sequence for D8Ertd812e (NM_198020.1,389-407).
cacagagtttgctcgaatt

SEQ ID NO: 811218 - DNA, 19 bp, Mus musculus
  siRNA target sequence for D8Ertd812e (NM_198020.1,391-409).
cagagtttgctcgaattca

SEQ ID NO: 811219 - DNA, 19 bp, Mus musculus
  siRNA target sequence for D8Ertd812e (NM_198020.1,473-491).
ggacttgtctgatcaagaa

SEQ ID NO: 811220 - DNA, 19 bp, Mus musculus
  siRNA target sequence for D8Ertd812e (NM_198020.1,679-697).
gggctgtagagcttatgca

SEQ ID NO: 811221 - DNA, 19 bp, Mus musculus
  siRNA target sequence for D8Ertd812e (NM_198020.1,718-736).
gtgtggcacatcttgttca

SEQ ID NO: 811222 - DNA, 19 bp, Mus musculus
  siRNA target sequence for D8Ertd812e (NM_198020.1,782-800).
ggcacctgagcgatttgat

SEQ ID NO: 811223 - DNA, 19 bp, Mus musculus
  siRNA target sequence for D8Ertd812e (NM_198020.1,787-805).
ctgagcgatttgatgtcat

SEQ ID NO: 811224 - DNA, 19 bp, Mus musculus
  siRNA target sequence for D8Ertd812e (NM_198020.1,967-985).
gccgagcctgccatgaaat

SEQ ID NO: 811225 - DNA, 19 bp, Mus musculus
  siRNA target sequence for D8Ertd812e (NM_198020.1,1030-1048).
gctaccagcgctatatcgt

SEQ ID NO: 811226 - DNA, 19 bp, Mus musculus
  siRNA target sequence for D8Ertd812e (NM_198020.1,1060-1078).
gcatcagtgctgacttcta

SEQ ID NO: 811227 - DNA, 19 bp, Mus musculus
  siRNA target sequence for D8Ertd812e (NM_198020.1,1076-1094).
ctatatccgggtctttgta

SEQ ID NO: 811228 - DNA, 19 bp, Mus musculus
  siRNA target sequence for D8Ertd812e (NM_198020.1,1088-1106).
ctttgtacgtgttttcaca

SEQ ID NO: 811229 - DNA, 19 bp, Mus musculus
  siRNA target sequence for D8Ertd812e (NM_198020.1,1105-1123).
caggccaggccaaggttaa

SEQ ID NO: 811230 - DNA, 19 bp, Mus musculus
  siRNA target sequence for D8Ertd812e (NM_198020.1,1107-1125).
ggccaggccaaggttaagt

SEQ ID NO: 811231 - DNA, 19 bp, Mus musculus
  siRNA target sequence for D8Ertd812e (NM_198020.1,1241-1259).
ctgtggtcctccagtaact

SEQ ID NO: 811232 - DNA, 19 bp, Mus musculus
  siRNA target sequence for D8Ertd812e (NM_198020.1,1404-1422).
ggcgtcctcagtgttgtta

SEQ ID NO: 811233 - DNA, 19 bp, Mus musculus
  siRNA target sequence for D8Ertd812e (NM_198020.1,1406-1424).
cgtcctcagtgttgttact

SEQ ID NO: 811234 - DNA, 19 bp, Mus musculus
  siRNA target sequence for D8Ertd812e (NM_198020.1,1435-1453).
ctgatgtccctctctacta

SEQ ID NO: 811235 - DNA, 19 bp, Mus musculus
  siRNA target sequence for D8Ertd812e (NM_198020.1,1546-1564).
ctctctcccatgcttgtaa

SEQ ID NO: 811236 - DNA, 19 bp, Mus musculus
  siRNA target sequence for D8Ertd812e (NM_198020.1,1550-1568).
ctcccatgcttgtaagaat

SEQ ID NO: 811237 - DNA, 19 bp, Mus musculus
  siRNA target sequence for D8Ertd812e (NM_198020.1,1644-1662).
cgggagcggctgtctgaaa

SEQ ID NO: 811238 - DNA, 19 bp, Mus musculus
  siRNA target sequence for D8Ertd812e (NM_198020.1,1666-1684).
gtccagcattccgaattct

SEQ ID NO: 811239 - DNA, 19 bp, Mus musculus
  siRNA target sequence for D8Ertd812e (NM_198020.1,1699-1717).
ggctgaaggccaacttcaa

SEQ ID NO: 811240 - DNA, 19 bp, Mus musculus
  siRNA target sequence for D8Ertd812e (NM_198020.1,1823-1841).
caaggcagcaagtgaagat

SEQ ID NO: 811241 - DNA, 19 bp, Mus musculus
  siRNA target sequence for D8Ertd812e (NM_198020.1,1852-1870).
ggcggaggctgctacagaa

SEQ ID NO: 811242 - DNA, 19 bp, Mus musculus
  siRNA target sequence for D8Ertd812e (NM_198020.1,1905-1923).
cgtgcagctcgccttaaga

SEQ ID NO: 811243 - DNA, 19 bp, Mus musculus
  siRNA target sequence for D8Ertd812e (NM_198020.1,1909-1927).
cagctcgccttaagacatt

SEQ ID NO: 811244 - DNA, 19 bp, Mus musculus
  siRNA target sequence for D8Ertd812e (NM_198020.1,1914-1932).
cgccttaagacatttcctt

SEQ ID NO: 811245 - DNA, 19 bp, Mus musculus
  siRNA target sequence for D8Ertd812e (NM_198020.1,1924-1942).
catttccttgcaaacgatt

SEQ ID NO: 811246 - DNA, 19 bp, Mus musculus
  siRNA target sequence for D8Ertd812e (NM_198020.1,1965-1983).
ggggaccagtgctgttatt

SEQ ID NO: 811247 - DNA, 19 bp, Mus musculus
  siRNA target sequence for D8Ertd812e (NM_198020.1,1967-1985).
ggaccagtgctgttattca

SEQ ID NO: 811248 - DNA, 19 bp, Mus musculus
  siRNA target sequence for D8Ertd812e (NM_198020.1,2016-2034).
gatatccccatcgaagaat

SEQ ID NO: 811249 - DNA, 19 bp, Mus musculus
  siRNA target sequence for BC030932 (NM_198021.1,279-297).
ggagtccatgcttaataaa

SEQ ID NO: 811250 - DNA, 19 bp, Mus musculus
  siRNA target sequence for BC030932 (NM_198021.1,303-321).
gagtactgttacaaaagta

SEQ ID NO: 811251 - DNA, 19 bp, Mus musculus
  siRNA target sequence for BC030932 (NM_198021.1,356-374).
ccgtcactagagagtttga

SEQ ID NO: 811252 - DNA, 19 bp, Mus musculus
  siRNA target sequence for BC030932 (NM_198021.1,483-501).
gctgattgacaaatatcaa

SEQ ID NO: 811253 - DNA, 19 bp, Mus musculus
  siRNA target sequence for BC030932 (NM_198021.1,484-502).
ctgattgacaaatatcaaa

SEQ ID NO: 811254 - DNA, 19 bp, Mus musculus
  siRNA target sequence for BC030932 (NM_198021.1,565-583).
cgacaccctcgacttctta

SEQ ID NO: 811255 - DNA, 19 bp, Mus musculus
  siRNA target sequence for BC030932 (NM_198021.1,612-630).
ggattgcttggcattttgt

SEQ ID NO: 811256 - DNA, 19 bp, Mus musculus
  siRNA target sequence for BC030932 (NM_198021.1,613-631).
gattgcttggcattttgta

SEQ ID NO: 811257 - DNA, 19 bp, Mus musculus
  siRNA target sequence for BC030932 (NM_198021.1,648-666).
cagtttagccaatgttctt

SEQ ID NO: 811258 - DNA, 19 bp, Mus musculus
  siRNA target sequence for BC030932 (NM_198021.1,700-718).
ccagacatcaaggattata

SEQ ID NO: 811259 - DNA, 19 bp, Mus musculus
  siRNA target sequence for BC030932 (NM_198021.1,701-719).
cagacatcaaggattataa

SEQ ID NO: 811260 - DNA, 19 bp, Mus musculus
  siRNA target sequence for BC030932 (NM_198021.1,705-723).
catcaaggattataaactt

SEQ ID NO: 811261 - DNA, 19 bp, Mus musculus
  siRNA target sequence for BC030932 (NM_198021.1,730-748).
gtagaaactaagtatggtt

SEQ ID NO: 811262 - DNA, 19 bp, Mus musculus
  siRNA target sequence for BC030932 (NM_198021.1,842-860).
gcggagcctggaaaataat

SEQ ID NO: 811263 - DNA, 19 bp, Mus musculus
  siRNA target sequence for BC030932 (NM_198021.1,868-886).
gacttctgtgtgtcatcaa

SEQ ID NO: 811264 - DNA, 19 bp, Mus musculus
  siRNA target sequence for BC030932 (NM_198021.1,953-971).
gtcttccgaatcctgaata

SEQ ID NO: 811265 - DNA, 19 bp, Mus musculus
  siRNA target sequence for BC030932 (NM_198021.1,1028-1046).
cgttaggagctgttatgta

SEQ ID NO: 811266 - DNA, 19 bp, Mus musculus
  siRNA target sequence for BC030932 (NM_198021.1,1039-1057).
gttatgtacgccgtgttta

SEQ ID NO: 811267 - DNA, 19 bp, Mus musculus
  siRNA target sequence for BC030932 (NM_198021.1,1044-1062).
gtacgccgtgtttaatcaa

SEQ ID NO: 811268 - DNA, 19 bp, Mus musculus
  siRNA target sequence for BC030932 (NM_198021.1,1067-1085).
gacctatatttgaagtcaa

SEQ ID NO: 811269 - DNA, 19 bp, Mus musculus
  siRNA target sequence for BC030932 (NM_198021.1,1101-1119).
caagagcttcagtagacaa

SEQ ID NO: 811270 - DNA, 19 bp, Mus musculus
  siRNA target sequence for BC030932 (NM_198021.1,1112-1130).
gtagacaactggatcagtt

SEQ ID NO: 811271 - DNA, 19 bp, Mus musculus
  siRNA target sequence for BC030932 (NM_198021.1,1122-1140).
ggatcagttgagtcgttta

SEQ ID NO: 811272 - DNA, 19 bp, Mus musculus
  siRNA target sequence for BC030932 (NM_198021.1,1126-1144).
cagttgagtcgtttaggat

SEQ ID NO: 811273 - DNA, 19 bp, Mus musculus
  siRNA target sequence for BC030932 (NM_198021.1,1177-1195).
cgtgaacacgtaaaactgt

SEQ ID NO: 811274 - DNA, 19 bp, Mus musculus
  siRNA target sequence for BC030932 (NM_198021.1,1178-1196).
gtgaacacgtaaaactgtt

SEQ ID NO: 811275 - DNA, 19 bp, Mus musculus
  siRNA target sequence for BC030932 (NM_198021.1,1183-1201).
cacgtaaaactgttgttaa

SEQ ID NO: 811276 - DNA, 19 bp, Mus musculus
  siRNA target sequence for BC030932 (NM_198021.1,1218-1236).
gagacccgatgcagatcaa

SEQ ID NO: 811277 - DNA, 19 bp, Mus musculus
  siRNA target sequence for BC030932 (NM_198021.1,1220-1238).
gacccgatgcagatcaaat

SEQ ID NO: 811278 - DNA, 19 bp, Mus musculus
  siRNA target sequence for BC030932 (NM_198021.1,1222-1240).
cccgatgcagatcaaatga

SEQ ID NO: 811279 - DNA, 19 bp, Mus musculus
  siRNA target sequence for BC030932 (NM_198021.1,1224-1242).
cgatgcagatcaaatgaca

SEQ ID NO: 811280 - DNA, 19 bp, Mus musculus
  siRNA target sequence for BC030932 (NM_198021.1,1267-1285).
ggtgcagtaacacttcaat

SEQ ID NO: 811281 - DNA, 19 bp, Mus musculus
  siRNA target sequence for BC030932 (NM_198021.1,1268-1286).
gtgcagtaacacttcaata

SEQ ID NO: 811282 - DNA, 19 bp, Mus musculus
  siRNA target sequence for BC030932 (NM_198021.1,1295-1313).
ccttattccaaagagataa

SEQ ID NO: 811283 - DNA, 19 bp, Mus musculus
  siRNA target sequence for BC030932 (NM_198021.1,1296-1314).
cttattccaaagagataat

SEQ ID NO: 811284 - DNA, 19 bp, Mus musculus
  siRNA target sequence for BC030932 (NM_198021.1,1325-1343).
cacagttcttcaaaggatt

SEQ ID NO: 811285 - DNA, 19 bp, Mus musculus
  siRNA target sequence for BC030932 (NM_198021.1,1362-1380).
gctgcccaagcgtgtcatt

SEQ ID NO: 811286 - DNA, 19 bp, Mus musculus
  siRNA target sequence for BC030932 (NM_198021.1,1402-1420).
ctgacctcagaatttgtca

SEQ ID NO: 811287 - DNA, 19 bp, Mus musculus
  siRNA target sequence for BC030932 (NM_198021.1,1431-1449).
ggtacctttcgttttacct

SEQ ID NO: 811288 - DNA, 19 bp, Mus musculus
  siRNA target sequence for BC030932 (NM_198021.1,1432-1450).
gtacctttcgttttaccta

SEQ ID NO: 811289 - DNA, 19 bp, Mus musculus
  siRNA target sequence for BC030932 (NM_198021.1,1539-1557).
gccaatccagattttgcta

SEQ ID NO: 811290 - DNA, 19 bp, Mus musculus
  siRNA target sequence for BC030932 (NM_198021.1,1540-1558).
ccaatccagattttgctaa

SEQ ID NO: 811291 - DNA, 19 bp, Mus musculus
  siRNA target sequence for BC030932 (NM_198021.1,1575-1593).
ggatttgctgctaaccaaa

SEQ ID NO: 811292 - DNA, 19 bp, Mus musculus
  siRNA target sequence for BC030932 (NM_198021.1,1576-1594).
gatttgctgctaaccaaaa

SEQ ID NO: 811293 - DNA, 19 bp, Mus musculus
  siRNA target sequence for BC030932 (NM_198021.1,1597-1615).
cctcctgatgagataaaga

SEQ ID NO: 811294 - DNA, 19 bp, Mus musculus
  siRNA target sequence for BC030932 (NM_198021.1,1686-1704).
catcattccaacatttgca

SEQ ID NO: 811295 - DNA, 19 bp, Mus musculus
  siRNA target sequence for BC030932 (NM_198021.1,1693-1711).
ccaacatttgcaaatctta

SEQ ID NO: 811296 - DNA, 19 bp, Mus musculus
  siRNA target sequence for BC030932 (NM_198021.1,1714-1732).
gactacccgtccatgaaaa

SEQ ID NO: 811297 - DNA, 19 bp, Mus musculus
  siRNA target sequence for BC030932 (NM_198021.1,1734-1752).
cgctttgattccaagaatt

SEQ ID NO: 811298 - DNA, 19 bp, Mus musculus
  siRNA target sequence for BC030932 (NM_198021.1,1735-1753).
gctttgattccaagaatta

SEQ ID NO: 811299 - DNA, 19 bp, Mus musculus
  siRNA target sequence for BC030932 (NM_198021.1,1789-1807).
cgtgtgaattcattagtgt

SEQ ID NO: 811300 - DNA, 19 bp, Mus musculus
  siRNA target sequence for BC030932 (NM_198021.1,1839-1857).
gtggtttgtgcttgatgat

SEQ ID NO: 811301 - DNA, 19 bp, Mus musculus
  siRNA target sequence for BC030932 (NM_198021.1,1841-1859).
ggtttgtgcttgatgatat

SEQ ID NO: 811302 - DNA, 19 bp, Mus musculus
  siRNA target sequence for BC030932 (NM_198021.1,1998-2016).
catccccctgagcattgaa

SEQ ID NO: 811303 - DNA, 19 bp, Mus musculus
  siRNA target sequence for BC030932 (NM_198021.1,2146-2164).
gacatagggaatcaaatga

SEQ ID NO: 811304 - DNA, 19 bp, Mus musculus
  siRNA target sequence for BC030932 (NM_198021.1,2178-2196).
gacaaaagttgcacattct

SEQ ID NO: 811305 - DNA, 19 bp, Mus musculus
  siRNA target sequence for BC030932 (NM_198021.1,2197-2215).
ggaagtcagcagattgata

SEQ ID NO: 811306 - DNA, 19 bp, Mus musculus
  siRNA target sequence for BC030932 (NM_198021.1,2206-2224).
cagattgataaggtcttta

SEQ ID NO: 811307 - DNA, 19 bp, Mus musculus
  siRNA target sequence for BC030932 (NM_198021.1,2301-2319).
ggggtcactaacacttgaa

SEQ ID NO: 811308 - DNA, 19 bp, Mus musculus
  siRNA target sequence for BC030932 (NM_198021.1,2303-2321).
ggtcactaacacttgaaga

SEQ ID NO: 811309 - DNA, 19 bp, Mus musculus
  siRNA target sequence for BC030932 (NM_198021.1,2399-2417).
ctcccatcgctcccattaa

SEQ ID NO: 811310 - DNA, 19 bp, Mus musculus
  siRNA target sequence for BC030932 (NM_198021.1,2402-2420).
ccatcgctcccattaaaca

SEQ ID NO: 811311 - DNA, 19 bp, Mus musculus
  siRNA target sequence for BC030932 (NM_198021.1,2408-2426).
ctcccattaaacagactaa

SEQ ID NO: 811312 - DNA, 19 bp, Mus musculus
  siRNA target sequence for BC030932 (NM_198021.1,2532-2550).
gggcctcggcatgatgttt

SEQ ID NO: 811313 - DNA, 19 bp, Mus musculus
  siRNA target sequence for BC030932 (NM_198021.1,2538-2556).
cggcatgatgttttcaaca

SEQ ID NO: 811314 - DNA, 19 bp, Mus musculus
  siRNA target sequence for BC030932 (NM_198021.1,2547-2565).
gttttcaacacccattgat

SEQ ID NO: 811315 - DNA, 19 bp, Mus musculus
  siRNA target sequence for BC030932 (NM_198021.1,2555-2573).
cacccattgataatacaaa

SEQ ID NO: 811316 - DNA, 19 bp, Mus musculus
  siRNA target sequence for BC030932 (NM_198021.1,2557-2575).
cccattgataatacaaaga

SEQ ID NO: 811317 - DNA, 19 bp, Mus musculus
  siRNA target sequence for BC030932 (NM_198021.1,2599-2617).
gccaacatgggctttcaga

SEQ ID NO: 811318 - DNA, 19 bp, Mus musculus
  siRNA target sequence for BC030932 (NM_198021.1,2625-2643).
gttcagcatgccagtcaat

SEQ ID NO: 811319 - DNA, 19 bp, Mus musculus
  siRNA target sequence for BC030932 (NM_198021.1,2704-2722).
gcacctcccactatgtcaa

SEQ ID NO: 811320 - DNA, 19 bp, Mus musculus
  siRNA target sequence for BC030932 (NM_198021.1,2708-2726).
ctcccactatgtcaaactt

SEQ ID NO: 811321 - DNA, 19 bp, Mus musculus
  siRNA target sequence for BC030932 (NM_198021.1,2710-2728).
cccactatgtcaaacttta

SEQ ID NO: 811322 - DNA, 19 bp, Mus musculus
  siRNA target sequence for BC030932 (NM_198021.1,2724-2742).
ctttagccctttgactatt

SEQ ID NO: 811323 - DNA, 19 bp, Mus musculus
  siRNA target sequence for BC030932 (NM_198021.1,2770-2788).
cagagaccaaccgatatgt

SEQ ID NO: 811324 - DNA, 19 bp, Mus musculus
  siRNA target sequence for BC030932 (NM_198021.1,2772-2790).
gagaccaaccgatatgtct

SEQ ID NO: 811325 - DNA, 19 bp, Mus musculus
  siRNA target sequence for BC030932 (NM_198021.1,2858-2876).
caaatcagtggctgaatca

SEQ ID NO: 811326 - DNA, 19 bp, Mus musculus
  siRNA target sequence for BC030932 (NM_198021.1,2924-2942).
gcacacaggggaatgtgat

SEQ ID NO: 811327 - DNA, 19 bp, Mus musculus
  siRNA target sequence for BC030932 (NM_198021.1,3032-3050).
gttcagctagcaacgattt

SEQ ID NO: 811328 - DNA, 19 bp, Mus musculus
  siRNA target sequence for BC030932 (NM_198021.1,3038-3056).
ctagcaacgatttgaaaga

SEQ ID NO: 811329 - DNA, 19 bp, Mus musculus
  siRNA target sequence for BC030932 (NM_198021.1,3041-3059).
gcaacgatttgaaagatct

SEQ ID NO: 811330 - DNA, 19 bp, Mus musculus
  siRNA target sequence for C130037N17Rik (NM_198024.1,966-984).
catcgggatgccaaccaaa

SEQ ID NO: 811331 - DNA, 19 bp, Mus musculus
  siRNA target sequence for C130037N17Rik (NM_198024.1,970-988).
gggatgccaaccaaaggaa

SEQ ID NO: 811332 - DNA, 19 bp, Mus musculus
  siRNA target sequence for C130037N17Rik (NM_198024.1,986-1004).
gaagataagtgttctttta

SEQ ID NO: 811333 - DNA, 19 bp, Mus musculus
  siRNA target sequence for C130037N17Rik (NM_198024.1,989-1007).
gataagtgttcttttacaa

SEQ ID NO: 811334 - DNA, 19 bp, Mus musculus
  siRNA target sequence for C130037N17Rik (NM_198024.1,1057-1075).
gggcactcaaaaacttact

SEQ ID NO: 811335 - DNA, 19 bp, Mus musculus
  siRNA target sequence for C130037N17Rik (NM_198024.1,1059-1077).
gcactcaaaaacttactca

SEQ ID NO: 811336 - DNA, 19 bp, Mus musculus
  siRNA target sequence for C130037N17Rik (NM_198024.1,1108-1126).
ggaaaaaacattcaaatct

SEQ ID NO: 811337 - DNA, 19 bp, Mus musculus
  siRNA target sequence for C130037N17Rik (NM_198024.1,1186-1204).
cgaatcagctgctgctttt

SEQ ID NO: 811338 - DNA, 19 bp, Mus musculus
  siRNA target sequence for C130037N17Rik (NM_198024.1,1199-1217).
gctttttcctccaaaccat

SEQ ID NO: 811339 - DNA, 19 bp, Mus musculus
  siRNA target sequence for C130037N17Rik (NM_198024.1,1232-1250).
cttgagaagattgatgtta

SEQ ID NO: 811340 - DNA, 19 bp, Mus musculus
  siRNA target sequence for C130037N17Rik (NM_198024.1,1237-1255).
gaagattgatgttataaca

SEQ ID NO: 811341 - DNA, 19 bp, Mus musculus
  siRNA target sequence for C130037N17Rik (NM_198024.1,1288-1306).
caactgcaagatctttgta

SEQ ID NO: 811342 - DNA, 19 bp, Mus musculus
  siRNA target sequence for C130037N17Rik (NM_198024.1,1484-1502).
cagaaaaatttgcgaataa

SEQ ID NO: 811343 - DNA, 19 bp, Mus musculus
  siRNA target sequence for C130037N17Rik (NM_198024.1,1496-1514).
cgaataactgcgactgatt

SEQ ID NO: 811344 - DNA, 19 bp, Mus musculus
  siRNA target sequence for C130037N17Rik (NM_198024.1,1497-1515).
gaataactgcgactgattt

SEQ ID NO: 811345 - DNA, 19 bp, Mus musculus
  siRNA target sequence for C130037N17Rik (NM_198024.1,1503-1521).
ctgcgactgatttagaaga

SEQ ID NO: 811346 - DNA, 19 bp, Mus musculus
  siRNA target sequence for C130037N17Rik (NM_198024.1,1517-1535).
gaagacgatggtataaaaa

SEQ ID NO: 811347 - DNA, 19 bp, Mus musculus
  siRNA target sequence for C130037N17Rik (NM_198024.1,1520-1538).
gacgatggtataaaaatat

SEQ ID NO: 811348 - DNA, 19 bp, Mus musculus
  siRNA target sequence for C130037N17Rik (NM_198024.1,1522-1540).
cgatggtataaaaatattt

SEQ ID NO: 811349 - DNA, 19 bp, Mus musculus
  siRNA target sequence for C130037N17Rik (NM_198024.1,1711-1729).
gatcgcacaagtcactaaa

SEQ ID NO: 811350 - DNA, 19 bp, Mus musculus
  siRNA target sequence for C130037N17Rik (NM_198024.1,1714-1732).
cgcacaagtcactaaaaat

SEQ ID NO: 811351 - DNA, 19 bp, Mus musculus
  siRNA target sequence for C130037N17Rik (NM_198024.1,1723-1741).
cactaaaaatggatcagat

SEQ ID NO: 811352 - DNA, 19 bp, Mus musculus
  siRNA target sequence for C130037N17Rik (NM_198024.1,1755-1773).
gccacagacagtcaattgt

SEQ ID NO: 811353 - DNA, 19 bp, Mus musculus
  siRNA target sequence for C130037N17Rik (NM_198024.1,1757-1775).
cacagacagtcaattgtct

SEQ ID NO: 811354 - DNA, 19 bp, Mus musculus
  siRNA target sequence for C130037N17Rik (NM_198024.1,1763-1781).
cagtcaattgtctgttcat

SEQ ID NO: 811355 - DNA, 19 bp, Mus musculus
  siRNA target sequence for 9630055N22Rik (NM_198025.1,678-696).
ccgtcgcctcggtatggtt

SEQ ID NO: 811356 - DNA, 19 bp, Mus musculus
  siRNA target sequence for 9630055N22Rik (NM_198025.1,679-697).
cgtcgcctcggtatggttt

SEQ ID NO: 811357 - DNA, 19 bp, Mus musculus
  siRNA target sequence for LOC230767 (NM_198026.1,18-36).
ggatcccgaccttttcctt

SEQ ID NO: 811358 - DNA, 19 bp, Mus musculus
  siRNA target sequence for LOC230767 (NM_198026.1,107-125).
ccgagtatgaggcaattgt

SEQ ID NO: 811359 - DNA, 19 bp, Mus musculus
  siRNA target sequence for LOC230767 (NM_198026.1,108-126).
cgagtatgaggcaattgta

SEQ ID NO: 811360 - DNA, 19 bp, Mus musculus
  siRNA target sequence for LOC230767 (NM_198026.1,174-192).
gatccccaagcccgtattt

SEQ ID NO: 811361 - DNA, 19 bp, Mus musculus
  siRNA target sequence for LOC230767 (NM_198026.1,195-213).
cccagaggcaaaatctcat

SEQ ID NO: 811362 - DNA, 19 bp, Mus musculus
  siRNA target sequence for LOC230767 (NM_198026.1,260-278).
ggagccattccccacataa

SEQ ID NO: 811363 - DNA, 19 bp, Mus musculus
  siRNA target sequence for LOC230767 (NM_198026.1,261-279).
gagccattccccacataaa

SEQ ID NO: 811364 - DNA, 19 bp, Mus musculus
  siRNA target sequence for LOC230767 (NM_198026.1,265-283).
cattccccacataaagact

SEQ ID NO: 811365 - DNA, 19 bp, Mus musculus
  siRNA target sequence for LOC230767 (NM_198026.1,545-563).
gtcgaaaggagtacctaat

SEQ ID NO: 811366 - DNA, 19 bp, Mus musculus
  siRNA target sequence for LOC230767 (NM_198026.1,617-635).
ggggacaggcctatgagaa

SEQ ID NO: 811367 - DNA, 19 bp, Mus musculus
  siRNA target sequence for LOC230767 (NM_198026.1,734-752).
gattgaagccccagaaaca

SEQ ID NO: 811368 - DNA, 19 bp, Mus musculus
  siRNA target sequence for LOC230767 (NM_198026.1,763-781).
gtgaccagtgcaggtaaaa

SEQ ID NO: 811369 - DNA, 19 bp, Mus musculus
  siRNA target sequence for LOC230767 (NM_198026.1,799-817).
ggcagggagctctgctata

SEQ ID NO: 811370 - DNA, 19 bp, Mus musculus
  siRNA target sequence for LOC230767 (NM_198026.1,896-914).
gaggacagccctttaagga

SEQ ID NO: 811371 - DNA, 19 bp, Mus musculus
  siRNA target sequence for LOC230767 (NM_198026.1,918-936).
ctccctacagcagttgaaa

SEQ ID NO: 811372 - DNA, 19 bp, Mus musculus
  siRNA target sequence for LOC230767 (NM_198026.1,958-976).
ggggacctcaagtttagga

SEQ ID NO: 811373 - DNA, 19 bp, Mus musculus
  siRNA target sequence for LOC230767 (NM_198026.1,1085-1103).
gcgctgggccctgtgattt

SEQ ID NO: 811374 - DNA, 19 bp, Mus musculus
  siRNA target sequence for LOC230767 (NM_198026.1,1167-1185).
ggatctcattaggactaaa

SEQ ID NO: 811375 - DNA, 19 bp, Mus musculus
  siRNA target sequence for C130099A02 (NM_198027.2,159-177).
caggcgccacctctaatct

SEQ ID NO: 811376 - DNA, 19 bp, Mus musculus
  siRNA target sequence for C130099A02 (NM_198027.2,162-180).
gcgccacctctaatctact

SEQ ID NO: 811377 - DNA, 19 bp, Mus musculus
  siRNA target sequence for C130099A02 (NM_198027.2,163-181).
cgccacctctaatctacta

SEQ ID NO: 811378 - DNA, 19 bp, Mus musculus
  siRNA target sequence for C130099A02 (NM_198027.2,221-239).
gcttcgacaggttttcaat

SEQ ID NO: 811379 - DNA, 19 bp, Mus musculus
  siRNA target sequence for C130099A02 (NM_198027.2,348-366).
cgctacgtggacaaagtgt

SEQ ID NO: 811380 - DNA, 19 bp, Mus musculus
  siRNA target sequence for C130099A02 (NM_198027.2,490-508).
gcctgggctcccatactgt

SEQ ID NO: 811381 - DNA, 19 bp, Mus musculus
  siRNA target sequence for C130099A02 (NM_198027.2,499-517).
cccatactgtcctcgattt

SEQ ID NO: 811382 - DNA, 19 bp, Mus musculus
  siRNA target sequence for C130099A02 (NM_198027.2,501-519).
catactgtcctcgatttct

SEQ ID NO: 811383 - DNA, 19 bp, Mus musculus
  siRNA target sequence for BB233602 (NM_198028.2,100-118).
ggcctcactagcagtatct

SEQ ID NO: 811384 - DNA, 19 bp, Mus musculus
  siRNA target sequence for BB233602 (NM_198028.2,102-120).
cctcactagcagtatctat

SEQ ID NO: 811385 - DNA, 19 bp, Mus musculus
  siRNA target sequence for BB233602 (NM_198028.2,136-154).
ggagtttagcaaaaagcta

SEQ ID NO: 811386 - DNA, 19 bp, Mus musculus
  siRNA target sequence for BB233602 (NM_198028.2,164-182).
gctgagggtagaaacatct

SEQ ID NO: 811387 - DNA, 19 bp, Mus musculus
  siRNA target sequence for BB233602 (NM_198028.2,167-185).
gagggtagaaacatcttct

SEQ ID NO: 811388 - DNA, 19 bp, Mus musculus
  siRNA target sequence for BB233602 (NM_198028.2,169-187).
gggtagaaacatcttcttt

SEQ ID NO: 811389 - DNA, 19 bp, Mus musculus
  siRNA target sequence for BB233602 (NM_198028.2,170-188).
ggtagaaacatcttctttt

SEQ ID NO: 811390 - DNA, 19 bp, Mus musculus
  siRNA target sequence for BB233602 (NM_198028.2,207-225).
ctgctttggctatggtata

SEQ ID NO: 811391 - DNA, 19 bp, Mus musculus
  siRNA target sequence for BB233602 (NM_198028.2,263-281).
caggtacttcaatttagca

SEQ ID NO: 811392 - DNA, 19 bp, Mus musculus
  siRNA target sequence for BB233602 (NM_198028.2,295-313).
caaatcttgtcctgatagt

SEQ ID NO: 811393 - DNA, 19 bp, Mus musculus
  siRNA target sequence for BB233602 (NM_198028.2,300-318).
cttgtcctgatagtgaaaa

SEQ ID NO: 811394 - DNA, 19 bp, Mus musculus
  siRNA target sequence for BB233602 (NM_198028.2,404-422).
ggaaattcttacgttctta

SEQ ID NO: 811395 - DNA, 19 bp, Mus musculus
  siRNA target sequence for BB233602 (NM_198028.2,405-423).
gaaattcttacgttcttaa

SEQ ID NO: 811396 - DNA, 19 bp, Mus musculus
  siRNA target sequence for BB233602 (NM_198028.2,433-451).
caggatatatggagagaaa

SEQ ID NO: 811397 - DNA, 19 bp, Mus musculus
  siRNA target sequence for BB233602 (NM_198028.2,501-519).
gggcagaaccacaatctgt

SEQ ID NO: 811398 - DNA, 19 bp, Mus musculus
  siRNA target sequence for BB233602 (NM_198028.2,503-521).
gcagaaccacaatctgtta

SEQ ID NO: 811399 - DNA, 19 bp, Mus musculus
  siRNA target sequence for BB233602 (NM_198028.2,506-524).
gaaccacaatctgttaact

SEQ ID NO: 811400 - DNA, 19 bp, Mus musculus
  siRNA target sequence for BB233602 (NM_198028.2,620-638).
gtcgacaccaagactaaaa

SEQ ID NO: 811401 - DNA, 19 bp, Mus musculus
  siRNA target sequence for BB233602 (NM_198028.2,711-729).
ggcctttcagagtaaacaa

SEQ ID NO: 811402 - DNA, 19 bp, Mus musculus
  siRNA target sequence for BB233602 (NM_198028.2,738-756).
gcaaaccagtgcaaatgat

SEQ ID NO: 811403 - DNA, 19 bp, Mus musculus
  siRNA target sequence for BB233602 (NM_198028.2,743-761).
ccagtgcaaatgatgtcaa

SEQ ID NO: 811404 - DNA, 19 bp, Mus musculus
  siRNA target sequence for BB233602 (NM_198028.2,894-912).
gagccattacctatgagaa

SEQ ID NO: 811405 - DNA, 19 bp, Mus musculus
  siRNA target sequence for BB233602 (NM_198028.2,1036-1054).
cgttttcagccagagtaaa

SEQ ID NO: 811406 - DNA, 19 bp, Mus musculus
  siRNA target sequence for BB233602 (NM_198028.2,1044-1062).
gccagagtaaagctgattt

SEQ ID NO: 811407 - DNA, 19 bp, Mus musculus
  siRNA target sequence for BB233602 (NM_198028.2,1055-1073).
gctgatttctcaaacatga

SEQ ID NO: 811408 - DNA, 19 bp, Mus musculus
  siRNA target sequence for BB233602 (NM_198028.2,1155-1173).
ctggcactggaagtgaaat

SEQ ID NO: 811409 - DNA, 19 bp, Mus musculus
  siRNA target sequence for BB233602 (NM_198028.2,1157-1175).
ggcactggaagtgaaatca

SEQ ID NO: 811410 - DNA, 19 bp, Mus musculus
  siRNA target sequence for BB233602 (NM_198028.2,1167-1185).
gtgaaatcagtgttcgaat

SEQ ID NO: 811411 - DNA, 19 bp, Mus musculus
  siRNA target sequence for BB233602 (NM_198028.2,1169-1187).
gaaatcagtgttcgaatta

SEQ ID NO: 811412 - DNA, 19 bp, Mus musculus
  siRNA target sequence for BB233602 (NM_198028.2,1189-1207).
ggcaccttccattgaatta

SEQ ID NO: 811413 - DNA, 19 bp, Mus musculus
  siRNA target sequence for BB233602 (NM_198028.2,1211-1229).
gtagatcatccatttctat

SEQ ID NO: 811414 - DNA, 19 bp, Mus musculus
  siRNA target sequence for AW060766 (NM_198033.1,29-47).
ctgagtgttcattatgcat

SEQ ID NO: 811415 - DNA, 19 bp, Mus musculus
  siRNA target sequence for AW060766 (NM_198033.1,62-80).
ccttgccagccagtgtaaa

SEQ ID NO: 811416 - DNA, 19 bp, Mus musculus
  siRNA target sequence for AW060766 (NM_198033.1,63-81).
cttgccagccagtgtaaaa

SEQ ID NO: 811417 - DNA, 19 bp, Mus musculus
  siRNA target sequence for AW060766 (NM_198033.1,68-86).
cagccagtgtaaaaaatct

SEQ ID NO: 811418 - DNA, 19 bp, Mus musculus
  siRNA target sequence for AW060766 (NM_198033.1,85-103).
cttacaagatgcattgtga

SEQ ID NO: 811419 - DNA, 19 bp, Mus musculus
  siRNA target sequence for AW060766 (NM_198033.1,115-133).
gtaactacacagaggaaat

SEQ ID NO: 811420 - DNA, 19 bp, Mus musculus
  siRNA target sequence for AW060766 (NM_198033.1,139-157).
gccatgtctctgttgagta

SEQ ID NO: 811421 - DNA, 19 bp, Mus musculus
  siRNA target sequence for AW060766 (NM_198033.1,174-192).
cagagctgttctaaatcca

SEQ ID NO: 811422 - DNA, 19 bp, Mus musculus
  siRNA target sequence for AW060766 (NM_198033.1,176-194).
gagctgttctaaatccaaa

SEQ ID NO: 811423 - DNA, 19 bp, Mus musculus
  siRNA target sequence for AW060766 (NM_198033.1,207-225).
ctgtaccaaagatctacta

SEQ ID NO: 811424 - DNA, 19 bp, Mus musculus
  siRNA target sequence for AW060766 (NM_198033.1,247-265).
gttgcctacttaaaagact

SEQ ID NO: 811425 - DNA, 19 bp, Mus musculus
  siRNA target sequence for AW060766 (NM_198033.1,250-268).
gcctacttaaaagacttta

SEQ ID NO: 811426 - DNA, 19 bp, Mus musculus
  siRNA target sequence for AW060766 (NM_198033.1,320-338).
caccatccgttgccaaaat

SEQ ID NO: 811427 - DNA, 19 bp, Mus musculus
  siRNA target sequence for AW060766 (NM_198033.1,322-340).
ccatccgttgccaaaatct

SEQ ID NO: 811428 - DNA, 19 bp, Mus musculus
  siRNA target sequence for AW060766 (NM_198033.1,391-409).
ctcttgtaccgcttactga

SEQ ID NO: 811429 - DNA, 19 bp, Mus musculus
  siRNA target sequence for AW060766 (NM_198033.1,477-495).
cgtgtgtgcaccttccaat

SEQ ID NO: 811430 - DNA, 19 bp, Mus musculus
  siRNA target sequence for AW060766 (NM_198033.1,499-517).
gcggttgatgaacttatga

SEQ ID NO: 811431 - DNA, 19 bp, Mus musculus
  siRNA target sequence for AW060766 (NM_198033.1,500-518).
cggttgatgaacttatgaa

SEQ ID NO: 811432 - DNA, 19 bp, Mus musculus
  siRNA target sequence for AW060766 (NM_198033.1,572-590).
gaaactgtggagatataaa

SEQ ID NO: 811433 - DNA, 19 bp, Mus musculus
  siRNA target sequence for AW060766 (NM_198033.1,598-616).
cgactaggtccagaaaagt

SEQ ID NO: 811434 - DNA, 19 bp, Mus musculus
  siRNA target sequence for AW060766 (NM_198033.1,601-619).
ctaggtccagaaaagtcta

SEQ ID NO: 811435 - DNA, 19 bp, Mus musculus
  siRNA target sequence for AW060766 (NM_198033.1,649-667).
gacagccaagtcaaccata

SEQ ID NO: 811436 - DNA, 19 bp, Mus musculus
  siRNA target sequence for AW060766 (NM_198033.1,655-673).
caagtcaaccatagaatga

SEQ ID NO: 811437 - DNA, 19 bp, Mus musculus
  siRNA target sequence for AW060766 (NM_198033.1,658-676).
gtcaaccatagaatgaaaa

SEQ ID NO: 811438 - DNA, 19 bp, Mus musculus
  siRNA target sequence for AW060766 (NM_198033.1,681-699).
cttgccttctcatattcaa

SEQ ID NO: 811439 - DNA, 19 bp, Mus musculus
  siRNA target sequence for AW060766 (NM_198033.1,684-702).
gccttctcatattcaagaa

SEQ ID NO: 811440 - DNA, 19 bp, Mus musculus
  siRNA target sequence for AW060766 (NM_198033.1,786-804).
gcagaggcaagaattagat

SEQ ID NO: 811441 - DNA, 19 bp, Mus musculus
  siRNA target sequence for AW060766 (NM_198033.1,805-823).
gaacacattgccatagtct

SEQ ID NO: 811442 - DNA, 19 bp, Mus musculus
  siRNA target sequence for AW060766 (NM_198033.1,810-828).
cattgccatagtctcaaaa

SEQ ID NO: 811443 - DNA, 19 bp, Mus musculus
  siRNA target sequence for AW060766 (NM_198033.1,835-853).
caagaacttgcttcgaaaa

SEQ ID NO: 811444 - DNA, 19 bp, Mus musculus
  siRNA target sequence for AW060766 (NM_198033.1,838-856).
gaacttgcttcgaaaatta

SEQ ID NO: 811445 - DNA, 19 bp, Mus musculus
  siRNA target sequence for AW060766 (NM_198033.1,930-948).
gagcactagtggtggttta

SEQ ID NO: 811446 - DNA, 19 bp, Mus musculus
  siRNA target sequence for AW060766 (NM_198033.1,932-950).
gcactagtggtggtttatt

SEQ ID NO: 811447 - DNA, 19 bp, Mus musculus
  siRNA target sequence for AW060766 (NM_198033.1,951-969).
gcttgagtctgcttttcga

SEQ ID NO: 811448 - DNA, 19 bp, Mus musculus
  siRNA target sequence for AW060766 (NM_198033.1,976-994).
gggggtgtccccttcagtt

SEQ ID NO: 811449 - DNA, 19 bp, Mus musculus
  siRNA target sequence for AW060766 (NM_198033.1,992-1010).
gttgtgtcatcgtagatga

SEQ ID NO: 811450 - DNA, 19 bp, Mus musculus
  siRNA target sequence for AW060766 (NM_198033.1,1050-1068).
catccaccgctgcaataaa

SEQ ID NO: 811451 - DNA, 19 bp, Mus musculus
  siRNA target sequence for AW060766 (NM_198033.1,1053-1071).
ccaccgctgcaataaactt

SEQ ID NO: 811452 - DNA, 19 bp, Mus musculus
  siRNA target sequence for AW060766 (NM_198033.1,1059-1077).
ctgcaataaacttatccta

SEQ ID NO: 811453 - DNA, 19 bp, Mus musculus
  siRNA target sequence for AW060766 (NM_198033.1,1205-1223).
gcaggctgccggtgttaca

SEQ ID NO: 811454 - DNA, 19 bp, Mus musculus
  siRNA target sequence for AW060766 (NM_198033.1,1214-1232).
cggtgttacagcttaccat

SEQ ID NO: 811455 - DNA, 19 bp, Mus musculus
  siRNA target sequence for AW060766 (NM_198033.1,1215-1233).
ggtgttacagcttaccatt

SEQ ID NO: 811456 - DNA, 19 bp, Mus musculus
  siRNA target sequence for AW060766 (NM_198033.1,1239-1257).
caggatgcatccagacata

SEQ ID NO: 811457 - DNA, 19 bp, Mus musculus
  siRNA target sequence for AW060766 (NM_198033.1,1242-1260).
gatgcatccagacatatgt

SEQ ID NO: 811458 - DNA, 19 bp, Mus musculus
  siRNA target sequence for AW060766 (NM_198033.1,1271-1289).
ctaattacgtttataacaa

SEQ ID NO: 811459 - DNA, 19 bp, Mus musculus
  siRNA target sequence for AW060766 (NM_198033.1,1350-1368).
gccctacctcgtgtttgat

SEQ ID NO: 811460 - DNA, 19 bp, Mus musculus
  siRNA target sequence for AW060766 (NM_198033.1,1352-1370).
cctacctcgtgtttgatgt

SEQ ID NO: 811461 - DNA, 19 bp, Mus musculus
  siRNA target sequence for AW060766 (NM_198033.1,1382-1400).
cagaacgacgggataatga

SEQ ID NO: 811462 - DNA, 19 bp, Mus musculus
  siRNA target sequence for AW060766 (NM_198033.1,1384-1402).
gaacgacgggataatgact

SEQ ID NO: 811463 - DNA, 19 bp, Mus musculus
  siRNA target sequence for AW060766 (NM_198033.1,1388-1406).
gacgggataatgactcata

SEQ ID NO: 811464 - DNA, 19 bp, Mus musculus
  siRNA target sequence for AW060766 (NM_198033.1,1482-1500).
ccgaaatattggcataata

SEQ ID NO: 811465 - DNA, 19 bp, Mus musculus
  siRNA target sequence for AW060766 (NM_198033.1,1493-1511).
gcataataacccattacaa

SEQ ID NO: 811466 - DNA, 19 bp, Mus musculus
  siRNA target sequence for AW060766 (NM_198033.1,1648-1666).
gtgcaaggctcaataggat

SEQ ID NO: 811467 - DNA, 19 bp, Mus musculus
  siRNA target sequence for AW060766 (NM_198033.1,1698-1716).
cattacacgagccaagtat

SEQ ID NO: 811468 - DNA, 19 bp, Mus musculus
  siRNA target sequence for AW060766 (NM_198033.1,1791-1809).
gaagcgtggggccattatt

SEQ ID NO: 811469 - DNA, 19 bp, Mus musculus
  siRNA target sequence for AW060766 (NM_198033.1,1795-1813).
cgtggggccattattaaga

SEQ ID NO: 811470 - DNA, 19 bp, Mus musculus
  siRNA target sequence for AW060766 (NM_198033.1,1812-1830).
gaccagtgacccaaactat

SEQ ID NO: 811471 - DNA, 19 bp, Mus musculus
  siRNA target sequence for AW060766 (NM_198033.1,1815-1833).
cagtgacccaaactataga

SEQ ID NO: 811472 - DNA, 19 bp, Mus musculus
  siRNA target sequence for AW060766 (NM_198033.1,1817-1835).
gtgacccaaactatagaca

SEQ ID NO: 811473 - DNA, 19 bp, Mus musculus
  siRNA target sequence for AW060766 (NM_198033.1,1832-1850).
gacatgacgcaatgaagat

SEQ ID NO: 811474 - DNA, 19 bp, Mus musculus
  siRNA target sequence for AW060766 (NM_198033.1,1839-1857).
cgcaatgaagattctgaaa

SEQ ID NO: 811475 - DNA, 19 bp, Mus musculus
  siRNA target sequence for AW060766 (NM_198033.1,2003-2021).
ctgatactgtcacttcaaa

SEQ ID NO: 811476 - DNA, 19 bp, Mus musculus
  siRNA target sequence for AW060766 (NM_198033.1,2168-2186).
ctggcttccctgtggtttt

SEQ ID NO: 811477 - DNA, 19 bp, Mus musculus
  siRNA target sequence for AW060766 (NM_198033.1,2290-2308).
gctgccgcctccacaagta

SEQ ID NO: 811478 - DNA, 19 bp, Mus musculus
  siRNA target sequence for AW060766 (NM_198033.1,2291-2309).
ctgccgcctccacaagtaa

SEQ ID NO: 811479 - DNA, 19 bp, Mus musculus
  siRNA target sequence for AW060766 (NM_198033.1,2293-2311).
gccgcctccacaagtaaga

SEQ ID NO: 811480 - DNA, 19 bp, Mus musculus
  siRNA target sequence for B830021E24Rik (NM_198034.1,188-206).
gacatcgaaagcgacaaaa

SEQ ID NO: 811481 - DNA, 19 bp, Mus musculus
  siRNA target sequence for B830021E24Rik (NM_198034.1,209-227).
gtcatccggaccaagatgt

SEQ ID NO: 811482 - DNA, 19 bp, Mus musculus
  siRNA target sequence for B830021E24Rik (NM_198034.1,215-233).
cggaccaagatgttcttgt

SEQ ID NO: 811483 - DNA, 19 bp, Mus musculus
  siRNA target sequence for B830021E24Rik (NM_198034.1,216-234).
ggaccaagatgttcttgta

SEQ ID NO: 811484 - DNA, 19 bp, Mus musculus
  siRNA target sequence for B830021E24Rik (NM_198034.1,260-278).
cggaggattgtcagcaaaa

SEQ ID NO: 811485 - DNA, 19 bp, Mus musculus
  siRNA target sequence for B830021E24Rik (NM_198034.1,261-279).
ggaggattgtcagcaaaaa

SEQ ID NO: 811486 - DNA, 19 bp, Mus musculus
  siRNA target sequence for B830021E24Rik (NM_198034.1,304-322).
catcaccatcgctgtgttt

SEQ ID NO: 811487 - DNA, 19 bp, Mus musculus
  siRNA target sequence for B830021E24Rik (NM_198034.1,380-398).
ggcaaccaggatatctgtt

SEQ ID NO: 811488 - DNA, 19 bp, Mus musculus
  siRNA target sequence for B830021E24Rik (NM_198034.1,431-449).
gtcctgagcgccttcaata

SEQ ID NO: 811489 - DNA, 19 bp, Mus musculus
  siRNA target sequence for B830021E24Rik (NM_198034.1,434-452).
ctgagcgccttcaataata

SEQ ID NO: 811490 - DNA, 19 bp, Mus musculus
  siRNA target sequence for B830021E24Rik (NM_198034.1,436-454).
gagcgccttcaataatatt

SEQ ID NO: 811491 - DNA, 19 bp, Mus musculus
  siRNA target sequence for B830021E24Rik (NM_198034.1,438-456).
gcgccttcaataatattct

SEQ ID NO: 811492 - DNA, 19 bp, Mus musculus
  siRNA target sequence for B830021E24Rik (NM_198034.1,440-458).
gccttcaataatattctca

SEQ ID NO: 811493 - DNA, 19 bp, Mus musculus
  siRNA target sequence for B830021E24Rik (NM_198034.1,543-561).
ctaaagacatctttgctat

SEQ ID NO: 811494 - DNA, 19 bp, Mus musculus
  siRNA target sequence for B830021E24Rik (NM_198034.1,568-586).
cggtattcccaaacacttt

SEQ ID NO: 811495 - DNA, 19 bp, Mus musculus
  siRNA target sequence for B830021E24Rik (NM_198034.1,631-649).
gctcagtgcttgttaccat

SEQ ID NO: 811496 - DNA, 19 bp, Mus musculus
  siRNA target sequence for B830021E24Rik (NM_198034.1,735-753).
cccgccacccggacatcaa

SEQ ID NO: 811497 - DNA, 19 bp, Mus musculus
  siRNA target sequence for B830021E24Rik (NM_198034.1,891-909).
gcacccaaatctactacat

SEQ ID NO: 811498 - DNA, 19 bp, Mus musculus
  siRNA target sequence for B830021E24Rik (NM_198034.1,907-925).
catgggccgtttcaagata

SEQ ID NO: 811499 - DNA, 19 bp, Mus musculus
  siRNA target sequence for B830021E24Rik (NM_198034.1,984-1002).
gcagcagacctctgtatat

SEQ ID NO: 811500 - DNA, 19 bp, Mus musculus
  siRNA target sequence for B830021E24Rik (NM_198034.1,1053-1071).
ccttctttggattgatcta

SEQ ID NO: 811501 - DNA, 19 bp, Mus musculus
  siRNA target sequence for B830021E24Rik (NM_198034.1,1221-1239).
gggctgcggcactgtactt

SEQ ID NO: 811502 - DNA, 19 bp, Mus musculus
  siRNA target sequence for B830021E24Rik (NM_198034.1,1223-1241).
gctgcggcactgtacttct

SEQ ID NO: 811503 - DNA, 19 bp, Mus musculus
  siRNA target sequence for B830021E24Rik (NM_198034.1,1224-1242).
ctgcggcactgtacttctt

SEQ ID NO: 811504 - DNA, 19 bp, Mus musculus
  siRNA target sequence for B830021E24Rik (NM_198034.1,1226-1244).
gcggcactgtacttcttct

SEQ ID NO: 811505 - DNA, 19 bp, Mus musculus
  siRNA target sequence for 7030401O21Rik (NM_198035.1,396-414).
cccctgccaactttgagaa

SEQ ID NO: 811506 - DNA, 19 bp, Mus musculus
  siRNA target sequence for 7030401O21Rik (NM_198035.1,460-478).
caacgttggggtcatctat

SEQ ID NO: 811507 - DNA, 19 bp, Mus musculus
  siRNA target sequence for 7030401O21Rik (NM_198035.1,662-680).
cacttcggtcctgatagaa

SEQ ID NO: 811508 - DNA, 19 bp, Mus musculus
  siRNA target sequence for 7030401O21Rik (NM_198035.1,667-685).
cggtcctgatagaaactat

SEQ ID NO: 811509 - DNA, 19 bp, Mus musculus
  siRNA target sequence for 7030401O21Rik (NM_198035.1,669-687).
gtcctgatagaaactatgt

SEQ ID NO: 811510 - DNA, 19 bp, Mus musculus
  siRNA target sequence for 7030401O21Rik (NM_198035.1,732-750).
gtgtctcgggtgacactaa

SEQ ID NO: 811511 - DNA, 19 bp, Mus musculus
  siRNA target sequence for 7030401O21Rik (NM_198035.1,881-899).
cagaccagcacgagttctt

SEQ ID NO: 811512 - DNA, 19 bp, Mus musculus
  siRNA target sequence for 7030401O21Rik (NM_198035.1,900-918).
gccagccatacaaagttca

SEQ ID NO: 811513 - DNA, 19 bp, Mus musculus
  siRNA target sequence for 7030401O21Rik (NM_198035.1,934-952).
cagtaaaagcaccttcttt

SEQ ID NO: 811514 - DNA, 19 bp, Mus musculus
  siRNA target sequence for 7030401O21Rik (NM_198035.1,957-975).
ctgataacgcggtagacat

SEQ ID NO: 811515 - DNA, 19 bp, Mus musculus
  siRNA target sequence for 7030401O21Rik (NM_198035.1,959-977).
gataacgcggtagacatta

SEQ ID NO: 811516 - DNA, 19 bp, Mus musculus
  siRNA target sequence for 7030401O21Rik (NM_198035.1,1203-1221).
gccaggtgtgcaagaaagt

SEQ ID NO: 811517 - DNA, 19 bp, Mus musculus
  siRNA target sequence for 7030401O21Rik (NM_198035.1,1364-1382).
ctgttttcctgcgatatgt

SEQ ID NO: 811518 - DNA, 19 bp, Mus musculus
  siRNA target sequence for 7030401O21Rik (NM_198035.1,1374-1392).
gcgatatgtgtgagacaaa

SEQ ID NO: 811519 - DNA, 19 bp, Mus musculus
  siRNA target sequence for 7030401O21Rik (NM_198035.1,1427-1445).
cgggatgggatatttgata

SEQ ID NO: 811520 - DNA, 19 bp, Mus musculus
  siRNA target sequence for 7030401O21Rik (NM_198035.1,1428-1446).
gggatgggatatttgataa

SEQ ID NO: 811521 - DNA, 19 bp, Mus musculus
  siRNA target sequence for 7030401O21Rik (NM_198035.1,1508-1526).
gcctccccggagttgaaat

SEQ ID NO: 811522 - DNA, 19 bp, Mus musculus
  siRNA target sequence for 7030401O21Rik (NM_198035.1,1510-1528).
ctccccggagttgaaatgt

SEQ ID NO: 811523 - DNA, 19 bp, Mus musculus
  siRNA target sequence for 7030401O21Rik (NM_198035.1,1583-1601).
ctcgagcacgtgaacttga

SEQ ID NO: 811524 - DNA, 19 bp, Mus musculus
  siRNA target sequence for 7030401O21Rik (NM_198035.1,1962-1980).
gccagcctgggaatagtaa

SEQ ID NO: 811525 - DNA, 19 bp, Mus musculus
  siRNA target sequence for 7030401O21Rik (NM_198035.1,1964-1982).
cagcctgggaatagtaagt

SEQ ID NO: 811526 - DNA, 19 bp, Mus musculus
  siRNA target sequence for 7030401O21Rik (NM_198035.1,1970-1988).
gggaatagtaagtacagtt

SEQ ID NO: 811527 - DNA, 19 bp, Mus musculus
  siRNA target sequence for 7030401O21Rik (NM_198035.1,2013-2031).
cccacacaagcgagttcaa

SEQ ID NO: 811528 - DNA, 19 bp, Mus musculus
  siRNA target sequence for 7030401O21Rik (NM_198035.1,2015-2033).
cacacaagcgagttcaact

SEQ ID NO: 811529 - DNA, 19 bp, Mus musculus
  siRNA target sequence for 7030401O21Rik (NM_198035.1,2073-2091).
gcaaggtttgtcacaaatt

SEQ ID NO: 811530 - DNA, 19 bp, Mus musculus
  siRNA target sequence for 7030401O21Rik (NM_198035.1,2099-2117).
ggtcgctcgaccatcaagt

SEQ ID NO: 811531 - DNA, 19 bp, Mus musculus
  siRNA target sequence for 7030401O21Rik (NM_198035.1,2162-2180).
gtctgcggccactacagtt

SEQ ID NO: 811532 - DNA, 19 bp, Mus musculus
  siRNA target sequence for 7030401O21Rik (NM_198035.1,2184-2202).
cccttaacctcatgagtaa

SEQ ID NO: 811533 - DNA, 19 bp, Mus musculus
  siRNA target sequence for 7030401O21Rik (NM_198035.1,2185-2203).
ccttaacctcatgagtaaa

SEQ ID NO: 811534 - DNA, 19 bp, Mus musculus
  siRNA target sequence for 7030401O21Rik (NM_198035.1,2254-2272).
gaccttcatgtacattata

SEQ ID NO: 811535 - DNA, 19 bp, Mus musculus
  siRNA target sequence for 7030401O21Rik (NM_198035.1,2256-2274).
ccttcatgtacattataca

SEQ ID NO: 811536 - DNA, 19 bp, Mus musculus
  siRNA target sequence for B430218L07Rik (NM_198037.1,688-706).
cagaggatcttcaattcgt

SEQ ID NO: 811537 - DNA, 19 bp, Mus musculus
  siRNA target sequence for B430218L07Rik (NM_198037.1,817-835).
gtggtagaagcctcctata

SEQ ID NO: 811538 - DNA, 19 bp, Mus musculus
  siRNA target sequence for B430218L07Rik (NM_198037.1,819-837).
ggtagaagcctcctataca

SEQ ID NO: 811539 - DNA, 19 bp, Mus musculus
  siRNA target sequence for B430218L07Rik (NM_198037.1,915-933).
cttcaacaccaatgtatca

SEQ ID NO: 811540 - DNA, 19 bp, Mus musculus
  siRNA target sequence for B430218L07Rik (NM_198037.1,918-936).
caacaccaatgtatcaaga

SEQ ID NO: 811541 - DNA, 19 bp, Mus musculus
  siRNA target sequence for B430218L07Rik (NM_198037.1,921-939).
caccaatgtatcaagaaca

SEQ ID NO: 811542 - DNA, 19 bp, Mus musculus
  siRNA target sequence for B430218L07Rik (NM_198037.1,988-1006).
ccaggacgagacttaaatt

SEQ ID NO: 811543 - DNA, 19 bp, Mus musculus
  siRNA target sequence for B430218L07Rik (NM_198037.1,1012-1030).
ctcgcagacaacctgaaat

SEQ ID NO: 811544 - DNA, 19 bp, Mus musculus
  siRNA target sequence for B430218L07Rik (NM_198037.1,1039-1057).
ggaatcaagtggcaatatt

SEQ ID NO: 811545 - DNA, 19 bp, Mus musculus
  siRNA target sequence for B430218L07Rik (NM_198037.1,1040-1058).
gaatcaagtggcaatattt

SEQ ID NO: 811546 - DNA, 19 bp, Mus musculus
  siRNA target sequence for B430218L07Rik (NM_198037.1,1061-1079).
gctcagaagaagggatttt

SEQ ID NO: 811547 - DNA, 19 bp, Mus musculus
  siRNA target sequence for B430218L07Rik (NM_198037.1,1364-1382).
gtgagaccaaaaggaaaat

SEQ ID NO: 811548 - DNA, 19 bp, Mus musculus
  siRNA target sequence for B430218L07Rik (NM_198037.1,1366-1384).
gagaccaaaaggaaaatgt

SEQ ID NO: 811549 - DNA, 19 bp, Mus musculus
  siRNA target sequence for B430218L07Rik (NM_198037.1,1429-1447).
cacgcagtaggctttcaca

SEQ ID NO: 811550 - DNA, 19 bp, Mus musculus
  siRNA target sequence for B430218L07Rik (NM_198037.1,1450-1468).
gcgttccagctgattcgaa

SEQ ID NO: 811551 - DNA, 19 bp, Mus musculus
  siRNA target sequence for B430218L07Rik (NM_198037.1,1481-1499).
gcactcggttccaagcaaa

SEQ ID NO: 811552 - DNA, 19 bp, Mus musculus
  siRNA target sequence for B430218L07Rik (NM_198037.1,1545-1563).
ggactcctcggaagaagat

SEQ ID NO: 811553 - DNA, 19 bp, Mus musculus
  siRNA target sequence for B430218L07Rik (NM_198037.1,1571-1589).
cgactctccgcgtcatcaa

SEQ ID NO: 811554 - DNA, 19 bp, Mus musculus
  siRNA target sequence for B430218L07Rik (NM_198037.1,1579-1597).
cgcgtcatcaacgaagaaa

SEQ ID NO: 811555 - DNA, 19 bp, Mus musculus
  siRNA target sequence for B430218L07Rik (NM_198037.1,1580-1598).
gcgtcatcaacgaagaaaa

SEQ ID NO: 811556 - DNA, 19 bp, Mus musculus
  siRNA target sequence for B430218L07Rik (NM_198037.1,1581-1599).
cgtcatcaacgaagaaaat

SEQ ID NO: 811557 - DNA, 19 bp, Mus musculus
  siRNA target sequence for B430218L07Rik (NM_198037.1,1616-1634).
ccgtaatgattcttaccta

SEQ ID NO: 811558 - DNA, 19 bp, Mus musculus
  siRNA target sequence for B430218L07Rik (NM_198037.1,1798-1816).
gtcggcaggttctacacta

SEQ ID NO: 811559 - DNA, 19 bp, Mus musculus
  siRNA target sequence for B430218L07Rik (NM_198037.1,1818-1836).
ccttcccaaccggatgatt

SEQ ID NO: 811560 - DNA, 19 bp, Mus musculus
  siRNA target sequence for B430218L07Rik (NM_198037.1,1887-1905).
gataatgactgtgagtaaa

SEQ ID NO: 811561 - DNA, 19 bp, Mus musculus
  siRNA target sequence for B430218L07Rik (NM_198037.1,1982-2000).
catattaccaagactcttt

SEQ ID NO: 811562 - DNA, 19 bp, Mus musculus
  siRNA target sequence for B430218L07Rik (NM_198037.1,1993-2011).
gactctttagcttcctata

SEQ ID NO: 811563 - DNA, 19 bp, Mus musculus
  siRNA target sequence for B430218L07Rik (NM_198037.1,1997-2015).
ctttagcttcctatacttt

SEQ ID NO: 811564 - DNA, 19 bp, Mus musculus
  siRNA target sequence for B430218L07Rik (NM_198037.1,2054-2072).
ctctcaccaggccatactt

SEQ ID NO: 811565 - DNA, 19 bp, Mus musculus
  siRNA target sequence for B430218L07Rik (NM_198037.1,2087-2105).
cccttcatactgacatcat

SEQ ID NO: 811566 - DNA, 19 bp, Mus musculus
  siRNA target sequence for B430218L07Rik (NM_198037.1,2088-2106).
ccttcatactgacatcata

SEQ ID NO: 811567 - DNA, 19 bp, Mus musculus
  siRNA target sequence for B430218L07Rik (NM_198037.1,2096-2114).
ctgacatcatacattatga

SEQ ID NO: 811568 - DNA, 19 bp, Mus musculus
  siRNA target sequence for B430218L07Rik (NM_198037.1,2131-2149).
gaattggttcggcaaaata

SEQ ID NO: 811569 - DNA, 19 bp, Mus musculus
  siRNA target sequence for B430218L07Rik (NM_198037.1,2136-2154).
ggttcggcaaaatatccta

SEQ ID NO: 811570 - DNA, 19 bp, Mus musculus
  siRNA target sequence for B430218L07Rik (NM_198037.1,2137-2155).
gttcggcaaaatatcctaa

SEQ ID NO: 811571 - DNA, 19 bp, Mus musculus
  siRNA target sequence for B430218L07Rik (NM_198037.1,2161-2179).
cctctcggcagccagatta

SEQ ID NO: 811572 - DNA, 19 bp, Mus musculus
  siRNA target sequence for B430218L07Rik (NM_198037.1,2162-2180).
ctctcggcagccagattat

SEQ ID NO: 811573 - DNA, 19 bp, Mus musculus
  siRNA target sequence for B430218L07Rik (NM_198037.1,2164-2182).
ctcggcagccagattatca

SEQ ID NO: 811574 - DNA, 19 bp, Mus musculus
  siRNA target sequence for B430218L07Rik (NM_198037.1,2298-2316).
gtgtattgtggtgatacaa

SEQ ID NO: 811575 - DNA, 19 bp, Mus musculus
  siRNA target sequence for B430218L07Rik (NM_198037.1,2307-2325).
ggtgatacaaccggaaata

SEQ ID NO: 811576 - DNA, 19 bp, Mus musculus
  siRNA target sequence for B430218L07Rik (NM_198037.1,2318-2336).
cggaaatacccgtcaaaca

SEQ ID NO: 811577 - DNA, 19 bp, Mus musculus
  siRNA target sequence for B430218L07Rik (NM_198037.1,2320-2338).
gaaatacccgtcaaacaat

SEQ ID NO: 811578 - DNA, 19 bp, Mus musculus
  siRNA target sequence for B430218L07Rik (NM_198037.1,2326-2344).
cccgtcaaacaattgaaaa

SEQ ID NO: 811579 - DNA, 19 bp, Mus musculus
  siRNA target sequence for B430218L07Rik (NM_198037.1,2327-2345).
ccgtcaaacaattgaaaaa

SEQ ID NO: 811580 - DNA, 19 bp, Mus musculus
  siRNA target sequence for B430218L07Rik (NM_198037.1,2430-2448).
gctggcaacactagaaagt

SEQ ID NO: 811581 - DNA, 19 bp, Mus musculus
  siRNA target sequence for B430218L07Rik (NM_198037.1,2461-2479).
ctgtctgccggcagctttt

SEQ ID NO: 811582 - DNA, 19 bp, Mus musculus
  siRNA target sequence for B430218L07Rik (NM_198037.1,2518-2536).
cgcatggtggagcattaca

SEQ ID NO: 811583 - DNA, 19 bp, Mus musculus
  siRNA target sequence for B430218L07Rik (NM_198037.1,2530-2548).
cattacacggcctatctca

SEQ ID NO: 811584 - DNA, 19 bp, Mus musculus
  siRNA target sequence for B430218L07Rik (NM_198037.1,2591-2609).
ctgtcagaaatgaagtaat

SEQ ID NO: 811585 - DNA, 19 bp, Mus musculus
  siRNA target sequence for B430218L07Rik (NM_198037.1,2629-2647).
gatgaatggatgacacaaa

SEQ ID NO: 811586 - DNA, 19 bp, Mus musculus
  siRNA target sequence for B430218L07Rik (NM_198037.1,2658-2676).
cagcctgaacacgtacatt

SEQ ID NO: 811587 - DNA, 19 bp, Mus musculus
  siRNA target sequence for B430218L07Rik (NM_198037.1,2660-2678).
gcctgaacacgtacattgt

SEQ ID NO: 811588 - DNA, 19 bp, Mus musculus
  siRNA target sequence for B430218L07Rik (NM_198037.1,2673-2691).
cattgtccgccgttacata

SEQ ID NO: 811589 - DNA, 19 bp, Mus musculus
  siRNA target sequence for B430218L07Rik (NM_198037.1,2677-2695).
gtccgccgttacatagcaa

SEQ ID NO: 811590 - DNA, 19 bp, Mus musculus
  siRNA target sequence for B430218L07Rik (NM_198037.1,2699-2717).
ccaatggcgtcctcagaat

SEQ ID NO: 811591 - DNA, 19 bp, Mus musculus
  siRNA target sequence for B430218L07Rik (NM_198037.1,2837-2855).
ctggctatgtcgtgacaat

SEQ ID NO: 811592 - DNA, 19 bp, Mus musculus
  siRNA target sequence for B430218L07Rik (NM_198037.1,2839-2857).
ggctatgtcgtgacaatca

SEQ ID NO: 811593 - DNA, 19 bp, Mus musculus
  siRNA target sequence for B430218L07Rik (NM_198037.1,2852-2870).
caatcagccacacaattca

SEQ ID NO: 811594 - DNA, 19 bp, Mus musculus
  siRNA target sequence for B430218L07Rik (NM_198037.1,2983-3001).
gatggtggcaacaaaataa

SEQ ID NO: 811595 - DNA, 19 bp, Mus musculus
  siRNA target sequence for B430218L07Rik (NM_198037.1,3245-3263).
gcagccactgctctaagta

SEQ ID NO: 811596 - DNA, 19 bp, Mus musculus
  siRNA target sequence for B430218L07Rik (NM_198037.1,3374-3392).
gccaccgaatggagcaaaa

SEQ ID NO: 811597 - DNA, 19 bp, Mus musculus
  siRNA target sequence for B430218L07Rik (NM_198037.1,3375-3393).
ccaccgaatggagcaaaat

SEQ ID NO: 811598 - DNA, 19 bp, Mus musculus
  siRNA target sequence for B430218L07Rik (NM_198037.1,3378-3396).
ccgaatggagcaaaatgaa

SEQ ID NO: 811599 - DNA, 19 bp, Mus musculus
  siRNA target sequence for B430218L07Rik (NM_198037.1,3379-3397).
cgaatggagcaaaatgaat

SEQ ID NO: 811600 - DNA, 19 bp, Mus musculus
  siRNA target sequence for B430218L07Rik (NM_198037.1,3548-3566).
gtgtcaacagcagatgtaa

SEQ ID NO: 811601 - DNA, 19 bp, Mus musculus
  siRNA target sequence for B430218L07Rik (NM_198037.1,3823-3841).
gtccttgccgtgtatgctt

SEQ ID NO: 811602 - DNA, 19 bp, Mus musculus
  siRNA target sequence for B430218L07Rik (NM_198037.1,4053-4071).
ccgctcgggaactgaaagt

SEQ ID NO: 811603 - DNA, 19 bp, Mus musculus
  siRNA target sequence for B430218L07Rik (NM_198037.1,4055-4073).
gctcgggaactgaaagtga

SEQ ID NO: 811604 - DNA, 19 bp, Mus musculus
  siRNA target sequence for B430218L07Rik (NM_198037.1,4113-4131).
gaaccctccatgcaacaat

SEQ ID NO: 811605 - DNA, 19 bp, Mus musculus
  siRNA target sequence for B430218L07Rik (NM_198037.1,4208-4226).
ccctgctgagccacaagtt

SEQ ID NO: 811606 - DNA, 19 bp, Mus musculus
  siRNA target sequence for 2310015I10Rik (NM_198095.1,73-91).
ccgtgcccatggatgagat

SEQ ID NO: 811607 - DNA, 19 bp, Mus musculus
  siRNA target sequence for 2310015I10Rik (NM_198095.1,152-170).
cctgttcggggttacctta

SEQ ID NO: 811608 - DNA, 19 bp, Mus musculus
  siRNA target sequence for 3110043L15Rik (NM_198100.1,263-281).
cagcctacggagacatcaa

SEQ ID NO: 811609 - DNA, 19 bp, Mus musculus
  siRNA target sequence for 3110043L15Rik (NM_198100.1,322-340).
cgccgtcgcctcaaagtct

SEQ ID NO: 811610 - DNA, 19 bp, Mus musculus
  siRNA target sequence for 3110043L15Rik (NM_198100.1,323-341).
gccgtcgcctcaaagtcta

SEQ ID NO: 811611 - DNA, 19 bp, Mus musculus
  siRNA target sequence for 3110043L15Rik (NM_198100.1,324-342).
ccgtcgcctcaaagtctat

SEQ ID NO: 811612 - DNA, 19 bp, Mus musculus
  siRNA target sequence for 3110043L15Rik (NM_198100.1,326-344).
gtcgcctcaaagtctatga

SEQ ID NO: 811613 - DNA, 19 bp, Mus musculus
  siRNA target sequence for 3110043L15Rik (NM_198100.1,445-463).
cagcaacgactcaaccaat

SEQ ID NO: 811614 - DNA, 19 bp, Mus musculus
  siRNA target sequence for 3110043L15Rik (NM_198100.1,469-487).
cacgagttgcagaagagta

SEQ ID NO: 811615 - DNA, 19 bp, Mus musculus
  siRNA target sequence for 3110043L15Rik (NM_198100.1,585-603).
cctggtagagactcatcta

SEQ ID NO: 811616 - DNA, 19 bp, Mus musculus
  siRNA target sequence for 3110043L15Rik (NM_198100.1,1685-1703).
ccatccgctgcgcttcatt

SEQ ID NO: 811617 - DNA, 19 bp, Mus musculus
  siRNA target sequence for 3110043L15Rik (NM_198100.1,1689-1707).
ccgctgcgcttcattctgt

SEQ ID NO: 811618 - DNA, 19 bp, Mus musculus
  siRNA target sequence for 3110043L15Rik (NM_198100.1,1778-1796).
catccatcaacctactgat

SEQ ID NO: 811619 - DNA, 19 bp, Mus musculus
  siRNA target sequence for 3110043L15Rik (NM_198100.1,1798-1816).
gagacggtgggctctgata

SEQ ID NO: 811620 - DNA, 19 bp, Mus musculus
  siRNA target sequence for 3110043L15Rik (NM_198100.1,1871-1889).
ctctcatcaaacacataga

SEQ ID NO: 811621 - DNA, 19 bp, Mus musculus
  siRNA target sequence for 5031419I10Rik (NM_198101.1,188-206).
ctggacaacctcgagatat

SEQ ID NO: 811622 - DNA, 19 bp, Mus musculus
  siRNA target sequence for 5031419I10Rik (NM_198101.1,191-209).
gacaacctcgagatatcat

SEQ ID NO: 811623 - DNA, 19 bp, Mus musculus
  siRNA target sequence for 5031419I10Rik (NM_198101.1,207-225).
cattggggaacgtaacttt

SEQ ID NO: 811624 - DNA, 19 bp, Mus musculus
  siRNA target sequence for 5031419I10Rik (NM_198101.1,211-229).
ggggaacgtaacttttgat

SEQ ID NO: 811625 - DNA, 19 bp, Mus musculus
  siRNA target sequence for 5031419I10Rik (NM_198101.1,394-412).
gaccaagggtggtgtagat

SEQ ID NO: 811626 - DNA, 19 bp, Mus musculus
  siRNA target sequence for 5031419I10Rik (NM_198101.1,414-432).
ctgccctggagtatgctaa

SEQ ID NO: 811627 - DNA, 19 bp, Mus musculus
  siRNA target sequence for 5031419I10Rik (NM_198101.1,493-511).
gctcgagtttgctaagagt

SEQ ID NO: 811628 - DNA, 19 bp, Mus musculus
  siRNA target sequence for 5031419I10Rik (NM_198101.1,494-512).
ctcgagtttgctaagagta

SEQ ID NO: 811629 - DNA, 19 bp, Mus musculus
  siRNA target sequence for 5031419I10Rik (NM_198101.1,497-515).
gagtttgctaagagtatca

SEQ ID NO: 811630 - DNA, 19 bp, Mus musculus
  siRNA target sequence for 5031419I10Rik (NM_198101.1,774-792).
ccgagctccagtacattca

SEQ ID NO: 811631 - DNA, 19 bp, Mus musculus
  siRNA target sequence for 5031419I10Rik (NM_198101.1,1054-1072).
ggtgacgctgggtctgttt

SEQ ID NO: 811632 - DNA, 19 bp, Mus musculus
  siRNA target sequence for 5031419I10Rik (NM_198101.1,1251-1269).
gtttccctcaggacacaaa

SEQ ID NO: 811633 - DNA, 19 bp, Mus musculus
  siRNA target sequence for 5031419I10Rik (NM_198101.1,1482-1500).
cggagtcctccgatgactt

SEQ ID NO: 811634 - DNA, 19 bp, Mus musculus
  siRNA target sequence for 5031419I10Rik (NM_198101.1,1483-1501).
ggagtcctccgatgacttt

SEQ ID NO: 811635 - DNA, 19 bp, Mus musculus
  siRNA target sequence for 5031419I10Rik (NM_198101.1,1648-1666).
ggtcagcgggacagaatgt

SEQ ID NO: 811636 - DNA, 19 bp, Mus musculus
  siRNA target sequence for 5031419I10Rik (NM_198101.1,1703-1721).
gagaccctcctcatccttt

SEQ ID NO: 811637 - DNA, 19 bp, Mus musculus
  siRNA target sequence for 5031419I10Rik (NM_198101.1,1752-1770).
ccctctttggggttgactt

SEQ ID NO: 811638 - DNA, 19 bp, Mus musculus
  siRNA target sequence for 5031419I10Rik (NM_198101.1,1852-1870).
gggcttgcagggtatctat

SEQ ID NO: 811639 - DNA, 19 bp, Mus musculus
  siRNA target sequence for 5031419I10Rik (NM_198101.1,1950-1968).
ggaactctcctcacgatat

SEQ ID NO: 811640 - DNA, 19 bp, Mus musculus
  siRNA target sequence for 5031419I10Rik (NM_198101.1,1975-1993).
cgttctcaagcgatttctt

SEQ ID NO: 811641 - DNA, 19 bp, Mus musculus
  siRNA target sequence for 5031419I10Rik (NM_198101.1,2197-2215).
ggtggctgctcggtttgaa

SEQ ID NO: 811642 - DNA, 19 bp, Mus musculus
  siRNA target sequence for 5031419I10Rik (NM_198101.1,2200-2218).
ggctgctcggtttgaagaa

SEQ ID NO: 811643 - DNA, 19 bp, Mus musculus
  siRNA target sequence for 5031419I10Rik (NM_198101.1,2201-2219).
gctgctcggtttgaagaaa

SEQ ID NO: 811644 - DNA, 19 bp, Mus musculus
  siRNA target sequence for 5031419I10Rik (NM_198101.1,2204-2222).
gctcggtttgaagaaaaca

SEQ ID NO: 811645 - DNA, 19 bp, Mus musculus
  siRNA target sequence for 5031419I10Rik (NM_198101.1,2233-2251).
caacaatctgggaattgta

SEQ ID NO: 811646 - DNA, 19 bp, Mus musculus
  siRNA target sequence for 5031419I10Rik (NM_198101.1,2467-2485).
gcacccagcctcacttctt

SEQ ID NO: 811647 - DNA, 19 bp, Mus musculus
  siRNA target sequence for 5031419I10Rik (NM_198101.1,2709-2727).
gccgccagccagtgaagta

SEQ ID NO: 811648 - DNA, 19 bp, Mus musculus
  siRNA target sequence for 5031419I10Rik (NM_198101.1,2739-2757).
gtgtgaggccagttactca

SEQ ID NO: 811649 - DNA, 19 bp, Mus musculus
  siRNA target sequence for 5031419I10Rik (NM_198101.1,2743-2761).
gaggccagttactcatcaa

SEQ ID NO: 811650 - DNA, 19 bp, Mus musculus
  siRNA target sequence for 5031419I10Rik (NM_198101.1,2823-2841).
cagtgcaccgaggtagttt

SEQ ID NO: 811651 - DNA, 19 bp, Mus musculus
  siRNA target sequence for 5031419I10Rik (NM_198101.1,2825-2843).
gtgcaccgaggtagtttga

SEQ ID NO: 811652 - DNA, 19 bp, Mus musculus
  siRNA target sequence for 5031419I10Rik (NM_198101.1,2906-2924).
ctgcccaagcactttgaga

SEQ ID NO: 811653 - DNA, 19 bp, Mus musculus
  siRNA target sequence for G430041M01Rik (NM_198102.1,142-160).
gtgatgtagaggagaacaa

SEQ ID NO: 811654 - DNA, 19 bp, Mus musculus
  siRNA target sequence for G430041M01Rik (NM_198102.1,176-194).
gtctcgctctcagtcaaaa

SEQ ID NO: 811655 - DNA, 19 bp, Mus musculus
  siRNA target sequence for G430041M01Rik (NM_198102.1,205-223).
gaactcctgctcgtgtaaa

SEQ ID NO: 811656 - DNA, 19 bp, Mus musculus
  siRNA target sequence for G430041M01Rik (NM_198102.1,211-229).
ctgctcgtgtaaaatcaga

SEQ ID NO: 811657 - DNA, 19 bp, Mus musculus
  siRNA target sequence for G430041M01Rik (NM_198102.1,259-277).
gggtgtccaaacattctga

SEQ ID NO: 811658 - DNA, 19 bp, Mus musculus
  siRNA target sequence for G430041M01Rik (NM_198102.1,529-547).
gagatcttcgtgaagtgtt

SEQ ID NO: 811659 - DNA, 19 bp, Mus musculus
  siRNA target sequence for G430041M01Rik (NM_198102.1,559-577).
gacctctgagtggtgttaa

SEQ ID NO: 811660 - DNA, 19 bp, Mus musculus
  siRNA target sequence for G430041M01Rik (NM_198102.1,562-580).
ctctgagtggtgttaatgt

SEQ ID NO: 811661 - DNA, 19 bp, Mus musculus
  siRNA target sequence for G430041M01Rik (NM_198102.1,568-586).
gtggtgttaatgtagttta

SEQ ID NO: 811662 - DNA, 19 bp, Mus musculus
  siRNA target sequence for G430041M01Rik (NM_198102.1,571-589).
gtgttaatgtagtttatga

SEQ ID NO: 811663 - DNA, 19 bp, Mus musculus
  siRNA target sequence for G430041M01Rik (NM_198102.1,604-622).
ggtcacgtggatttgcttt

SEQ ID NO: 811664 - DNA, 19 bp, Mus musculus
  siRNA target sequence for G430041M01Rik (NM_198102.1,656-674).
ggctatggagagagcaaat

SEQ ID NO: 811665 - DNA, 19 bp, Mus musculus
  siRNA target sequence for G430041M01Rik (NM_198102.1,680-698).
ggagctggacggtagaaga

SEQ ID NO: 811666 - DNA, 19 bp, Mus musculus
  siRNA target sequence for G430041M01Rik (NM_198102.1,681-699).
gagctggacggtagaagaa

SEQ ID NO: 811667 - DNA, 19 bp, Mus musculus
  siRNA target sequence for G430041M01Rik (NM_198102.1,694-712).
gaagaatccgtgtggatta

SEQ ID NO: 811668 - DNA, 19 bp, Mus musculus
  siRNA target sequence for G430041M01Rik (NM_198102.1,831-849).
ggtagacgacgagattctt

SEQ ID NO: 811669 - DNA, 19 bp, Mus musculus
  siRNA target sequence for G430041M01Rik (NM_198102.1,832-850).
gtagacgacgagattctta

SEQ ID NO: 811670 - DNA, 19 bp, Mus musculus
  siRNA target sequence for G430041M01Rik (NM_198102.1,835-853).
gacgacgagattcttacta

SEQ ID NO: 811671 - DNA, 19 bp, Mus musculus
  siRNA target sequence for G430041M01Rik (NM_198102.1,840-858).
cgagattcttactacgata

SEQ ID NO: 811672 - DNA, 19 bp, Mus musculus
  siRNA target sequence for G430041M01Rik (NM_198102.1,950-968).
gagatcccgttcctatagt

SEQ ID NO: 811673 - DNA, 19 bp, Mus musculus
  siRNA target sequence for AI414418 (NM_198103.1,249-267).
gcaacgtctaccagaacta

SEQ ID NO: 811674 - DNA, 19 bp, Mus musculus
  siRNA target sequence for AI414418 (NM_198103.1,613-631).
ggacctggtggaatacgat

SEQ ID NO: 811675 - DNA, 19 bp, Mus musculus
  siRNA target sequence for AI414418 (NM_198103.1,762-780).
cggtggtcaacgtcaaaga

SEQ ID NO: 811676 - DNA, 19 bp, Mus musculus
  siRNA target sequence for AI414418 (NM_198103.1,766-784).
ggtcaacgtcaaagacaat

SEQ ID NO: 811677 - DNA, 19 bp, Mus musculus
  siRNA target sequence for AI414418 (NM_198103.1,842-860).
gcggaaaatgccaagatca

SEQ ID NO: 811678 - DNA, 19 bp, Mus musculus
  siRNA target sequence for AI414418 (NM_198103.1,1081-1099).
cttggatgtttgtattgca

SEQ ID NO: 811679 - DNA, 19 bp, Mus musculus
  siRNA target sequence for AI414418 (NM_198103.1,1126-1144).
cttgctggacaaattaaat

SEQ ID NO: 811680 - DNA, 19 bp, Mus musculus
  siRNA target sequence for AI414418 (NM_198103.1,1224-1242).
ccgaggtgcttgtgtttga

SEQ ID NO: 811681 - DNA, 19 bp, Mus musculus
  siRNA target sequence for AI414418 (NM_198103.1,1407-1425).
cgctgctctacattcacaa

SEQ ID NO: 811682 - DNA, 19 bp, Mus musculus
  siRNA target sequence for AI414418 (NM_198103.1,1426-1444).
gctgtgccacgtcttcttt

SEQ ID NO: 811683 - DNA, 19 bp, Mus musculus
  siRNA target sequence for AI414418 (NM_198103.1,1427-1445).
ctgtgccacgtcttcttta

SEQ ID NO: 811684 - DNA, 19 bp, Mus musculus
  siRNA target sequence for AI414418 (NM_198103.1,1545-1563).
gcatgttcgtggatgcttt

SEQ ID NO: 811685 - DNA, 19 bp, Mus musculus
  siRNA target sequence for AI414418 (NM_198103.1,1722-1740).
gttacaaggagattatcat

SEQ ID NO: 811686 - DNA, 19 bp, Mus musculus
  siRNA target sequence for AI414418 (NM_198103.1,1839-1857).
gcggggtcagtaactttga

SEQ ID NO: 811687 - DNA, 19 bp, Mus musculus
  siRNA target sequence for AI414418 (NM_198103.1,1985-2003).
gagagcctggtagaaatca

SEQ ID NO: 811688 - DNA, 19 bp, Mus musculus
  siRNA target sequence for AI414418 (NM_198103.1,2074-2092).
caggcagaacgcatccttt

SEQ ID NO: 811689 - DNA, 19 bp, Mus musculus
  siRNA target sequence for AI414418 (NM_198103.1,2080-2098).
gaacgcatcctttctctat

SEQ ID NO: 811690 - DNA, 19 bp, Mus musculus
  siRNA target sequence for AI414418 (NM_198103.1,2083-2101).
cgcatcctttctctatgaa

SEQ ID NO: 811691 - DNA, 19 bp, Mus musculus
  siRNA target sequence for ORF34 (NM_198105.1,360-378).
ctggggctcgggtattggt

SEQ ID NO: 811692 - DNA, 19 bp, Mus musculus
  siRNA target sequence for ORF34 (NM_198105.1,591-609).
ggcagactgcgcaactgat

SEQ ID NO: 811693 - DNA, 19 bp, Mus musculus
  siRNA target sequence for ORF34 (NM_198105.1,710-728).
cgggtcaaggtctttcaga

SEQ ID NO: 811694 - DNA, 19 bp, Mus musculus
  siRNA target sequence for ORF34 (NM_198105.1,804-822).
ctgagtatgcgctttacaa

SEQ ID NO: 811695 - DNA, 19 bp, Mus musculus
  siRNA target sequence for ORF34 (NM_198105.1,806-824).
gagtatgcgctttacaata

SEQ ID NO: 811696 - DNA, 19 bp, Mus musculus
  siRNA target sequence for ORF34 (NM_198105.1,808-826).
gtatgcgctttacaatatt

SEQ ID NO: 811697 - DNA, 19 bp, Mus musculus
  siRNA target sequence for ORF34 (NM_198105.1,922-940).
gggtttgaagcgaatgaat

SEQ ID NO: 811698 - DNA, 19 bp, Mus musculus
  siRNA target sequence for ORF34 (NM_198105.1,923-941).
ggtttgaagcgaatgaatt

SEQ ID NO: 811699 - DNA, 19 bp, Mus musculus
  siRNA target sequence for ORF34 (NM_198105.1,924-942).
gtttgaagcgaatgaattt

SEQ ID NO: 811700 - DNA, 19 bp, Mus musculus
  siRNA target sequence for ORF34 (NM_198105.1,937-955).
gaattttcccatatttgct

SEQ ID NO: 811701 - DNA, 19 bp, Mus musculus
  siRNA target sequence for ORF34 (NM_198105.1,1032-1050).
ctcttgcatcacttaaggt

SEQ ID NO: 811702 - DNA, 19 bp, Mus musculus
  siRNA target sequence for ORF34 (NM_198105.1,1077-1095).
cttgtgacgtcgtgatcaa

SEQ ID NO: 811703 - DNA, 19 bp, Mus musculus
  siRNA target sequence for ORF34 (NM_198105.1,1108-1126).
gtatgttagttccatcaaa

SEQ ID NO: 811704 - DNA, 19 bp, Mus musculus
  siRNA target sequence for ORF34 (NM_198105.1,1156-1174).
ggatgtcttcaaacaatct

SEQ ID NO: 811705 - DNA, 19 bp, Mus musculus
  siRNA target sequence for ORF34 (NM_198105.1,1210-1228).
gaaagcagttgagtactat

SEQ ID NO: 811706 - DNA, 19 bp, Mus musculus
  siRNA target sequence for ORF34 (NM_198105.1,1215-1233).
cagttgagtactattcagt

SEQ ID NO: 811707 - DNA, 19 bp, Mus musculus
  siRNA target sequence for ORF34 (NM_198105.1,1225-1243).
ctattcagtcacaaccaaa

SEQ ID NO: 811708 - DNA, 19 bp, Mus musculus
  siRNA target sequence for ORF34 (NM_198105.1,1307-1325).
ccccttccacggaatcaga

SEQ ID NO: 811709 - DNA, 19 bp, Mus musculus
  siRNA target sequence for ORF34 (NM_198105.1,1308-1326).
cccttccacggaatcagat

SEQ ID NO: 811710 - DNA, 19 bp, Mus musculus
  siRNA target sequence for ORF34 (NM_198105.1,1410-1428).
ccaactcgtctcttctctt

SEQ ID NO: 811711 - DNA, 19 bp, Mus musculus
  siRNA target sequence for ORF34 (NM_198105.1,1469-1487).
gccatgctgcaggacaatt

SEQ ID NO: 811712 - DNA, 19 bp, Mus musculus
  siRNA target sequence for ORF34 (NM_198105.1,1503-1521).
ctgtttcttatgactctaa

SEQ ID NO: 811713 - DNA, 19 bp, Mus musculus
  siRNA target sequence for ORF34 (NM_198105.1,1543-1561).
cctgacttccaaaacttca

SEQ ID NO: 811714 - DNA, 19 bp, Mus musculus
  siRNA target sequence for ORF34 (NM_198105.1,1565-1583).
cctttgggaccagattctt

SEQ ID NO: 811715 - DNA, 19 bp, Mus musculus
  siRNA target sequence for ORF34 (NM_198105.1,1740-1758).
ctgaaagtgaacctcatat

SEQ ID NO: 811716 - DNA, 19 bp, Mus musculus
  siRNA target sequence for ORF34 (NM_198105.1,1861-1879).
ccgaaggggtcttatgtat

SEQ ID NO: 811717 - DNA, 19 bp, Mus musculus
  siRNA target sequence for ORF34 (NM_198105.1,1866-1884).
ggggtcttatgtatccata

SEQ ID NO: 811718 - DNA, 19 bp, Mus musculus
  siRNA target sequence for ORF34 (NM_198105.1,1867-1885).
gggtcttatgtatccatat

SEQ ID NO: 811719 - DNA, 19 bp, Mus musculus
  siRNA target sequence for ORF34 (NM_198105.1,1868-1886).
ggtcttatgtatccatata

SEQ ID NO: 811720 - DNA, 19 bp, Mus musculus
  siRNA target sequence for ORF34 (NM_198105.1,1980-1998).
ggtcagctcgccaatatgt

SEQ ID NO: 811721 - DNA, 19 bp, Mus musculus
  siRNA target sequence for ORF34 (NM_198105.1,1981-1999).
gtcagctcgccaatatgta

SEQ ID NO: 811722 - DNA, 19 bp, Mus musculus
  siRNA target sequence for ORF34 (NM_198105.1,1983-2001).
cagctcgccaatatgtata

SEQ ID NO: 811723 - DNA, 19 bp, Mus musculus
  siRNA target sequence for ORF34 (NM_198105.1,2022-2040).
cagagacacagcgaaaaat

SEQ ID NO: 811724 - DNA, 19 bp, Mus musculus
  siRNA target sequence for ORF34 (NM_198105.1,2143-2161).
ggtatctgcactcactttt

SEQ ID NO: 811725 - DNA, 19 bp, Mus musculus
  siRNA target sequence for ORF34 (NM_198105.1,2316-2334).
gctgtgtactccgatacat

SEQ ID NO: 811726 - DNA, 19 bp, Mus musculus
  siRNA target sequence for ORF34 (NM_198105.1,2497-2515).
ggtcgacacagctctgttt

SEQ ID NO: 811727 - DNA, 19 bp, Mus musculus
  siRNA target sequence for ORF34 (NM_198105.1,2613-2631).
gccgagagcgagtatcact

SEQ ID NO: 811728 - DNA, 19 bp, Mus musculus
  siRNA target sequence for ORF34 (NM_198105.1,2622-2640).
gagtatcactggttgaact

SEQ ID NO: 811729 - DNA, 19 bp, Mus musculus
  siRNA target sequence for ORF34 (NM_198105.1,2696-2714).
cttgaaggcgtcaacatga

SEQ ID NO: 811730 - DNA, 19 bp, Mus musculus
  siRNA target sequence for ORF34 (NM_198105.1,2779-2797).
ctaccctgtttctctgtat

SEQ ID NO: 811731 - DNA, 19 bp, Mus musculus
  siRNA target sequence for ORF34 (NM_198105.1,2871-2889).
caccccaaggaggaaaact

SEQ ID NO: 811732 - DNA, 19 bp, Mus musculus
  siRNA target sequence for ORF34 (NM_198105.1,2958-2976).
gcatgcaagtggtttctgt

SEQ ID NO: 811733 - DNA, 19 bp, Mus musculus
  siRNA target sequence for ORF34 (NM_198105.1,2983-3001).
gccaggaaaagggtatgta

SEQ ID NO: 811734 - DNA, 19 bp, Mus musculus
  siRNA target sequence for LOC208169 (NM_198106.1,339-357).
gcatctgaaagattttcca

SEQ ID NO: 811735 - DNA, 19 bp, Mus musculus
  siRNA target sequence for LOC208169 (NM_198106.1,340-358).
catctgaaagattttccaa

SEQ ID NO: 811736 - DNA, 19 bp, Mus musculus
  siRNA target sequence for LOC208169 (NM_198106.1,361-379).
cctcttcctgtgatactat

SEQ ID NO: 811737 - DNA, 19 bp, Mus musculus
  siRNA target sequence for LOC208169 (NM_198106.1,362-380).
ctcttcctgtgatactatt

SEQ ID NO: 811738 - DNA, 19 bp, Mus musculus
  siRNA target sequence for LOC208169 (NM_198106.1,453-471).
gtggatggatccagacata

SEQ ID NO: 811739 - DNA, 19 bp, Mus musculus
  siRNA target sequence for LOC208169 (NM_198106.1,463-481).
ccagacatattctttggta

SEQ ID NO: 811740 - DNA, 19 bp, Mus musculus
  siRNA target sequence for LOC208169 (NM_198106.1,508-526).
gttgccttcgacatggata

SEQ ID NO: 811741 - DNA, 19 bp, Mus musculus
  siRNA target sequence for LOC208169 (NM_198106.1,511-529).
gccttcgacatggatatat

SEQ ID NO: 811742 - DNA, 19 bp, Mus musculus
  siRNA target sequence for LOC208169 (NM_198106.1,512-530).
ccttcgacatggatatata

SEQ ID NO: 811743 - DNA, 19 bp, Mus musculus
  siRNA target sequence for LOC208169 (NM_198106.1,531-549).
catgcttcaaaagttattt

SEQ ID NO: 811744 - DNA, 19 bp, Mus musculus
  siRNA target sequence for LOC208169 (NM_198106.1,543-561).
gttattttggcagatacta

SEQ ID NO: 811745 - DNA, 19 bp, Mus musculus
  siRNA target sequence for LOC208169 (NM_198106.1,552-570).
gcagatactagtaattaca

SEQ ID NO: 811746 - DNA, 19 bp, Mus musculus
  siRNA target sequence for LOC208169 (NM_198106.1,553-571).
cagatactagtaattacaa

SEQ ID NO: 811747 - DNA, 19 bp, Mus musculus
  siRNA target sequence for LOC208169 (NM_198106.1,569-587).
caattcccggatttctgat

SEQ ID NO: 811748 - DNA, 19 bp, Mus musculus
  siRNA target sequence for LOC208169 (NM_198106.1,574-592).
cccggatttctgattaatt

SEQ ID NO: 811749 - DNA, 19 bp, Mus musculus
  siRNA target sequence for LOC208169 (NM_198106.1,575-593).
ccggatttctgattaatta

SEQ ID NO: 811750 - DNA, 19 bp, Mus musculus
  siRNA target sequence for LOC208169 (NM_198106.1,583-601).
ctgattaattacaccttaa

SEQ ID NO: 811751 - DNA, 19 bp, Mus musculus
  siRNA target sequence for LOC208169 (NM_198106.1,585-603).
gattaattacaccttaata

SEQ ID NO: 811752 - DNA, 19 bp, Mus musculus
  siRNA target sequence for LOC208169 (NM_198106.1,594-612).
caccttaatactttggtat

SEQ ID NO: 811753 - DNA, 19 bp, Mus musculus
  siRNA target sequence for LOC208169 (NM_198106.1,615-633).
gcagtctgtgaataaatta

SEQ ID NO: 811754 - DNA, 19 bp, Mus musculus
  siRNA target sequence for LOC208169 (NM_198106.1,616-634).
cagtctgtgaataaattat

SEQ ID NO: 811755 - DNA, 19 bp, Mus musculus
  siRNA target sequence for LOC208169 (NM_198106.1,646-664).
gtcccctggttactatttt

SEQ ID NO: 811756 - DNA, 19 bp, Mus musculus
  siRNA target sequence for LOC208169 (NM_198106.1,648-666).
cccctggttactattttca

SEQ ID NO: 811757 - DNA, 19 bp, Mus musculus
  siRNA target sequence for LOC208169 (NM_198106.1,658-676).
ctattttcagctgttctta

SEQ ID NO: 811758 - DNA, 19 bp, Mus musculus
  siRNA target sequence for LOC208169 (NM_198106.1,734-752).
gcctcacaaatttaattaa

SEQ ID NO: 811759 - DNA, 19 bp, Mus musculus
  siRNA target sequence for LOC208169 (NM_198106.1,768-786).
gacctcagtgttatcctta

SEQ ID NO: 811760 - DNA, 19 bp, Mus musculus
  siRNA target sequence for LOC208169 (NM_198106.1,847-865).
gcccacaaggtcatgtcta

SEQ ID NO: 811761 - DNA, 19 bp, Mus musculus
  siRNA target sequence for LOC208169 (NM_198106.1,863-881).
ctacagcttggtcgtatat

SEQ ID NO: 811762 - DNA, 19 bp, Mus musculus
  siRNA target sequence for LOC208169 (NM_198106.1,866-884).
cagcttggtcgtatattgt

SEQ ID NO: 811763 - DNA, 19 bp, Mus musculus
  siRNA target sequence for LOC208169 (NM_198106.1,869-887).
cttggtcgtatattgttga

SEQ ID NO: 811764 - DNA, 19 bp, Mus musculus
  siRNA target sequence for LOC208169 (NM_198106.1,875-893).
cgtatattgttgaaagctt

SEQ ID NO: 811765 - DNA, 19 bp, Mus musculus
  siRNA target sequence for LOC208169 (NM_198106.1,890-908).
gcttcattactggaattgt

SEQ ID NO: 811766 - DNA, 19 bp, Mus musculus
  siRNA target sequence for LOC208169 (NM_198106.1,999-1017).
cttctatgtttgtgaacta

SEQ ID NO: 811767 - DNA, 19 bp, Mus musculus
  siRNA target sequence for LOC208169 (NM_198106.1,1002-1020).
ctatgtttgtgaactagtt

SEQ ID NO: 811768 - DNA, 19 bp, Mus musculus
  siRNA target sequence for LOC208169 (NM_198106.1,1085-1103).
caggagttgaagcatttct

SEQ ID NO: 811769 - DNA, 19 bp, Mus musculus
  siRNA target sequence for LOC208169 (NM_198106.1,1096-1114).
gcatttctgctcgaattct

SEQ ID NO: 811770 - DNA, 19 bp, Mus musculus
  siRNA target sequence for LOC208169 (NM_198106.1,1141-1159).
cttatggtgttcactttca

SEQ ID NO: 811771 - DNA, 19 bp, Mus musculus
  siRNA target sequence for LOC208169 (NM_198106.1,1233-1251).
cttcacactgattgtttta

SEQ ID NO: 811772 - DNA, 19 bp, Mus musculus
  siRNA target sequence for LOC208169 (NM_198106.1,1236-1254).
cacactgattgttttaaga

SEQ ID NO: 811773 - DNA, 19 bp, Mus musculus
  siRNA target sequence for LOC208169 (NM_198106.1,1347-1365).
gaaaggaacaccgaacata

SEQ ID NO: 811774 - DNA, 19 bp, Mus musculus
  siRNA target sequence for LOC208169 (NM_198106.1,1351-1369).
ggaacaccgaacataaata

SEQ ID NO: 811775 - DNA, 19 bp, Mus musculus
  siRNA target sequence for LOC208169 (NM_198106.1,1352-1370).
gaacaccgaacataaatat

SEQ ID NO: 811776 - DNA, 19 bp, Mus musculus
  siRNA target sequence for LOC208169 (NM_198106.1,1385-1403).
cctactcggacatttctct

SEQ ID NO: 811777 - DNA, 19 bp, Mus musculus
  siRNA target sequence for LOC208169 (NM_198106.1,1411-1429).
gagagggaaagatctcaaa

SEQ ID NO: 811778 - DNA, 19 bp, Mus musculus
  siRNA target sequence for LOC208169 (NM_198106.1,1413-1431).
gagggaaagatctcaaata

SEQ ID NO: 811779 - DNA, 19 bp, Mus musculus
  siRNA target sequence for LOC208169 (NM_198106.1,1415-1433).
gggaaagatctcaaatatt

SEQ ID NO: 811780 - DNA, 19 bp, Mus musculus
  siRNA target sequence for LOC208169 (NM_198106.1,1454-1472).
gcgtaattaccctgattgt

SEQ ID NO: 811781 - DNA, 19 bp, Mus musculus
  siRNA target sequence for LOC208169 (NM_198106.1,1456-1474).
gtaattaccctgattgtca

SEQ ID NO: 811782 - DNA, 19 bp, Mus musculus
  siRNA target sequence for LOC208169 (NM_198106.1,1463-1481).
ccctgattgtcaatagatt

SEQ ID NO: 811783 - DNA, 19 bp, Mus musculus
  siRNA target sequence for LOC208169 (NM_198106.1,1465-1483).
ctgattgtcaatagattta

SEQ ID NO: 811784 - DNA, 19 bp, Mus musculus
  siRNA target sequence for LOC208169 (NM_198106.1,1519-1537).
gatgtcacatcaacaaaat

SEQ ID NO: 811785 - DNA, 19 bp, Mus musculus
  siRNA target sequence for LOC208169 (NM_198106.1,1556-1574).
cattccaacactttcaaga

SEQ ID NO: 811786 - DNA, 19 bp, Mus musculus
  siRNA target sequence for LOC208169 (NM_198106.1,1570-1588).
caagagctaaccaaatcta

SEQ ID NO: 811787 - DNA, 19 bp, Mus musculus
  siRNA target sequence for LOC208169 (NM_198106.1,1592-1610).
ccatggcactcaaatttga

SEQ ID NO: 811788 - DNA, 19 bp, Mus musculus
  siRNA target sequence for LOC208169 (NM_198106.1,1598-1616).
cactcaaatttgacaaaga

SEQ ID NO: 811789 - DNA, 19 bp, Mus musculus
  siRNA target sequence for LOC208169 (NM_198106.1,1641-1659).
ggttgacaatgcaattata

SEQ ID NO: 811790 - DNA, 19 bp, Mus musculus
  siRNA target sequence for LOC208169 (NM_198106.1,1701-1719).
gcatcagaaggtgaaatgt

SEQ ID NO: 811791 - DNA, 19 bp, Mus musculus
  siRNA target sequence for LOC208169 (NM_198106.1,1886-1904).
gtgagaagaagggagaata

SEQ ID NO: 811792 - DNA, 19 bp, Mus musculus
  siRNA target sequence for LOC208169 (NM_198106.1,1955-1973).
cctttcttagaaaattact

SEQ ID NO: 811793 - DNA, 19 bp, Mus musculus
  siRNA target sequence for LOC208169 (NM_198106.1,1972-1990).
ctactcaactgggtgtata

SEQ ID NO: 811794 - DNA, 19 bp, Mus musculus
  siRNA target sequence for LOC208169 (NM_198106.1,1975-1993).
ctcaactgggtgtataata

SEQ ID NO: 811795 - DNA, 19 bp, Mus musculus
  siRNA target sequence for LOC208169 (NM_198106.1,1977-1995).
caactgggtgtataatact

SEQ ID NO: 811796 - DNA, 19 bp, Mus musculus
  siRNA target sequence for LOC208169 (NM_198106.1,1980-1998).
ctgggtgtataatactaaa

SEQ ID NO: 811797 - DNA, 19 bp, Mus musculus
  siRNA target sequence for LOC208169 (NM_198106.1,1982-2000).
gggtgtataatactaaaaa

SEQ ID NO: 811798 - DNA, 19 bp, Mus musculus
  siRNA target sequence for LOC208169 (NM_198106.1,2018-2036).
caagatacatgtttcttca

SEQ ID NO: 811799 - DNA, 19 bp, Mus musculus
  siRNA target sequence for LOC208169 (NM_198106.1,2038-2056).
gcatgccatagaatagtct

SEQ ID NO: 811800 - DNA, 19 bp, Mus musculus
  siRNA target sequence for LOC208169 (NM_198106.1,2039-2057).
catgccatagaatagtctt

SEQ ID NO: 811801 - DNA, 19 bp, Mus musculus
  siRNA target sequence for LOC208169 (NM_198106.1,2044-2062).
catagaatagtcttcacaa

SEQ ID NO: 811802 - DNA, 19 bp, Mus musculus
  siRNA target sequence for LOC208169 (NM_198106.1,2048-2066).
gaatagtcttcacaaatga

SEQ ID NO: 811803 - DNA, 19 bp, Mus musculus
  siRNA target sequence for LOC208169 (NM_198106.1,2091-2109).
ggtattaatgagcacatat

SEQ ID NO: 811804 - DNA, 19 bp, Mus musculus
  siRNA target sequence for LOC208169 (NM_198106.1,2100-2118).
gagcacatatcctatgata

SEQ ID NO: 811805 - DNA, 19 bp, Mus musculus
  siRNA target sequence for LOC208169 (NM_198106.1,2102-2120).
gcacatatcctatgataat

SEQ ID NO: 811806 - DNA, 19 bp, Mus musculus
  siRNA target sequence for LOC208169 (NM_198106.1,2123-2141).
gttggatttcccgactaaa

SEQ ID NO: 811807 - DNA, 19 bp, Mus musculus
  siRNA target sequence for LOC208169 (NM_198106.1,2132-2150).
cccgactaaaagacatcta

SEQ ID NO: 811808 - DNA, 19 bp, Mus musculus
  siRNA target sequence for LOC208169 (NM_198106.1,2133-2151).
ccgactaaaagacatctat

SEQ ID NO: 811809 - DNA, 19 bp, Mus musculus
  siRNA target sequence for LOC208169 (NM_198106.1,2135-2153).
gactaaaagacatctatga

SEQ ID NO: 811810 - DNA, 19 bp, Mus musculus
  siRNA target sequence for LOC208169 (NM_198106.1,2137-2155).
ctaaaagacatctatgaca

SEQ ID NO: 811811 - DNA, 19 bp, Mus musculus
  siRNA target sequence for LOC208169 (NM_198106.1,2148-2166).
ctatgacaacgagataaaa

SEQ ID NO: 811812 - DNA, 19 bp, Mus musculus
  siRNA target sequence for LOC208169 (NM_198106.1,2168-2186).
gtgctaactactattttct

SEQ ID NO: 811813 - DNA, 19 bp, Mus musculus
  siRNA target sequence for LOC208169 (NM_198106.1,2284-2302).
gtcggcatcctagatataa

SEQ ID NO: 811814 - DNA, 19 bp, Mus musculus
  siRNA target sequence for LOC208169 (NM_198106.1,2286-2304).
cggcatcctagatataata

SEQ ID NO: 811815 - DNA, 19 bp, Mus musculus
  siRNA target sequence for LOC208169 (NM_198106.1,2288-2306).
gcatcctagatataatact

SEQ ID NO: 811816 - DNA, 19 bp, Mus musculus
  siRNA target sequence for LOC208169 (NM_198106.1,2296-2314).
gatataatacttatcgaaa

SEQ ID NO: 811817 - DNA, 19 bp, Mus musculus
  siRNA target sequence for LOC208169 (NM_198106.1,2310-2328).
cgaaacagactccattagt

SEQ ID NO: 811818 - DNA, 19 bp, Mus musculus
  siRNA target sequence for LOC208169 (NM_198106.1,2319-2337).
ctccattagttacaatttt

SEQ ID NO: 811819 - DNA, 19 bp, Mus musculus
  siRNA target sequence for LOC208169 (NM_198106.1,2383-2401).
cgtatactgcgcatcttga

SEQ ID NO: 811820 - DNA, 19 bp, Mus musculus
  siRNA target sequence for LOC208169 (NM_198106.1,2384-2402).
gtatactgcgcatcttgaa

SEQ ID NO: 811821 - DNA, 19 bp, Mus musculus
  siRNA target sequence for LOC208169 (NM_198106.1,2392-2410).
cgcatcttgaagcttgtaa

SEQ ID NO: 811822 - DNA, 19 bp, Mus musculus
  siRNA target sequence for LOC208169 (NM_198106.1,2413-2431).
ccaaaactgttgcaaatca

SEQ ID NO: 811823 - DNA, 19 bp, Mus musculus
  siRNA target sequence for LOC208169 (NM_198106.1,2459-2477).
catttcggtattctatact

SEQ ID NO: 811824 - DNA, 19 bp, Mus musculus
  siRNA target sequence for LOC208169 (NM_198106.1,2495-2513).
gggaaatggatgtactgaa

SEQ ID NO: 811825 - DNA, 19 bp, Mus musculus
  siRNA target sequence for LOC208169 (NM_198106.1,2502-2520).
ggatgtactgaatataatt

SEQ ID NO: 811826 - DNA, 19 bp, Mus musculus
  siRNA target sequence for LOC208169 (NM_198106.1,2511-2529).
gaatataattgatcagatt

SEQ ID NO: 811827 - DNA, 19 bp, Mus musculus
  siRNA target sequence for LOC208169 (NM_198106.1,2531-2549).
caagttccaaacagactaa

SEQ ID NO: 811828 - DNA, 19 bp, Mus musculus
  siRNA target sequence for LOC208169 (NM_198106.1,2542-2560).
cagactaaacagatattgt

SEQ ID NO: 811829 - DNA, 19 bp, Mus musculus
  siRNA target sequence for LOC208169 (NM_198106.1,2595-2613).
gaaagagctaggctactta

SEQ ID NO: 811830 - DNA, 19 bp, Mus musculus
  siRNA target sequence for LOC208169 (NM_198106.1,2599-2617).
gagctaggctacttagagt

SEQ ID NO: 811831 - DNA, 19 bp, Mus musculus
  siRNA target sequence for LOC208169 (NM_198106.1,2601-2619).
gctaggctacttagagtat

SEQ ID NO: 811832 - DNA, 19 bp, Mus musculus
  siRNA target sequence for LOC208169 (NM_198106.1,2627-2645).
cggaaatcgctgtcactat

SEQ ID NO: 811833 - DNA, 19 bp, Mus musculus
  siRNA target sequence for LOC208169 (NM_198106.1,2629-2647).
gaaatcgctgtcactatga

SEQ ID NO: 811834 - DNA, 19 bp, Mus musculus
  siRNA target sequence for LOC208169 (NM_198106.1,2689-2707).
gaaattgtcaagactttca

SEQ ID NO: 811835 - DNA, 19 bp, Mus musculus
  siRNA target sequence for LOC208169 (NM_198106.1,2708-2726).
ggtccaaaggaattataca

SEQ ID NO: 811836 - DNA, 19 bp, Mus musculus
  siRNA target sequence for LOC208169 (NM_198106.1,2730-2748).
ggtggaaggcactgagatt

SEQ ID NO: 811837 - DNA, 19 bp, Mus musculus
  siRNA target sequence for LOC208169 (NM_198106.1,2731-2749).
gtggaaggcactgagatta

SEQ ID NO: 811838 - DNA, 19 bp, Mus musculus
  siRNA target sequence for LOC208169 (NM_198106.1,2734-2752).
gaaggcactgagattaaca

SEQ ID NO: 811839 - DNA, 19 bp, Mus musculus
  siRNA target sequence for LOC208169 (NM_198106.1,2737-2755).
ggcactgagattaacaagt

SEQ ID NO: 811840 - DNA, 19 bp, Mus musculus
  siRNA target sequence for LOC208169 (NM_198106.1,2739-2757).
cactgagattaacaagtta

SEQ ID NO: 811841 - DNA, 19 bp, Mus musculus
  siRNA target sequence for LOC208169 (NM_198106.1,2743-2761).
gagattaacaagttaatca

SEQ ID NO: 811842 - DNA, 19 bp, Mus musculus
  siRNA target sequence for LOC208169 (NM_198106.1,2782-2800).
cttgatctgcagtctgtta

SEQ ID NO: 811843 - DNA, 19 bp, Mus musculus
  siRNA target sequence for LOC208169 (NM_198106.1,2818-2836).
gaagaagccccgtgcaata

SEQ ID NO: 811844 - DNA, 19 bp, Mus musculus
  siRNA target sequence for LOC208169 (NM_198106.1,2907-2925).
ctgtggaaataacatattt

SEQ ID NO: 811845 - DNA, 19 bp, Mus musculus
  siRNA target sequence for LOC208169 (NM_198106.1,2909-2927).
gtggaaataacatatttga

SEQ ID NO: 811846 - DNA, 19 bp, Mus musculus
  siRNA target sequence for LOC208169 (NM_198106.1,2940-2958).
gccagaaggaatctatgta

SEQ ID NO: 811847 - DNA, 19 bp, Mus musculus
  siRNA target sequence for LOC208169 (NM_198106.1,2941-2959).
ccagaaggaatctatgtaa

SEQ ID NO: 811848 - DNA, 19 bp, Mus musculus
  siRNA target sequence for LOC208169 (NM_198106.1,3067-3085).
ctgctcagcggggagataa

SEQ ID NO: 811849 - DNA, 19 bp, Mus musculus
  siRNA target sequence for LOC208169 (NM_198106.1,3069-3087).
gctcagcggggagataata

SEQ ID NO: 811850 - DNA, 19 bp, Mus musculus
  siRNA target sequence for LOC208169 (NM_198106.1,3072-3090).
cagcggggagataatagga

SEQ ID NO: 811851 - DNA, 19 bp, Mus musculus
  siRNA target sequence for LOC208169 (NM_198106.1,3093-3111).
gttaaactgtctgactaaa

SEQ ID NO: 811852 - DNA, 19 bp, Mus musculus
  siRNA target sequence for LOC208169 (NM_198106.1,3107-3125).
ctaaagaacggatgcaata

SEQ ID NO: 811853 - DNA, 19 bp, Mus musculus
  siRNA target sequence for LOC208169 (NM_198106.1,3167-3185).
ccattagccacttgtatga

SEQ ID NO: 811854 - DNA, 19 bp, Mus musculus
  siRNA target sequence for LOC208169 (NM_198106.1,3177-3195).
cttgtatgaaggctttgaa

SEQ ID NO: 811855 - DNA, 19 bp, Mus musculus
  siRNA target sequence for LOC208169 (NM_198106.1,3203-3221).
gtcctaacatgaaacataa

SEQ ID NO: 811856 - DNA, 19 bp, Mus musculus
  siRNA target sequence for LOC208169 (NM_198106.1,3261-3279).
gattcgagaacacttatct

SEQ ID NO: 811857 - DNA, 19 bp, Mus musculus
  siRNA target sequence for LOC208169 (NM_198106.1,3315-3333).
ctgcaatgccttcataaga

SEQ ID NO: 811858 - DNA, 19 bp, Mus musculus
  siRNA target sequence for LOC208169 (NM_198106.1,3412-3430).
gactgccagctgcgaaaaa

SEQ ID NO: 811859 - DNA, 19 bp, Mus musculus
  siRNA target sequence for LOC208169 (NM_198106.1,3417-3435).
ccagctgcgaaaaatttat

SEQ ID NO: 811860 - DNA, 19 bp, Mus musculus
  siRNA target sequence for LOC208169 (NM_198106.1,3418-3436).
cagctgcgaaaaatttata

SEQ ID NO: 811861 - DNA, 19 bp, Mus musculus
  siRNA target sequence for LOC208169 (NM_198106.1,3438-3456).
ggcgcctttcctaattcct

SEQ ID NO: 811862 - DNA, 19 bp, Mus musculus
  siRNA target sequence for LOC208169 (NM_198106.1,3459-3477).
gacgtgccatcagatacaa

SEQ ID NO: 811863 - DNA, 19 bp, Mus musculus
  siRNA target sequence for LOC208169 (NM_198106.1,3501-3519).
gatgattattcaaacttca

SEQ ID NO: 811864 - DNA, 19 bp, Mus musculus
  siRNA target sequence for LOC208169 (NM_198106.1,3562-3580).
ccacctcgaagaatttcga

SEQ ID NO: 811865 - DNA, 19 bp, Mus musculus
  siRNA target sequence for LOC208169 (NM_198106.1,3563-3581).
cacctcgaagaatttcgat

SEQ ID NO: 811866 - DNA, 19 bp, Mus musculus
  siRNA target sequence for Thrap5 (NM_198107.1,248-266).
cacacatgatccatatcct

SEQ ID NO: 811867 - DNA, 19 bp, Mus musculus
  siRNA target sequence for Thrap5 (NM_198107.1,373-391).
gctgatggacagatcaaat

SEQ ID NO: 811868 - DNA, 19 bp, Mus musculus
  siRNA target sequence for Thrap5 (NM_198107.1,479-497).
ggctgcacaacggtgtaaa

SEQ ID NO: 811869 - DNA, 19 bp, Mus musculus
  siRNA target sequence for Thrap5 (NM_198107.1,530-548).
ctagcttcggagagaagtt

SEQ ID NO: 811870 - DNA, 19 bp, Mus musculus
  siRNA target sequence for Thrap5 (NM_198107.1,776-794).
gcgcgtcacccgtgaagtt

SEQ ID NO: 811871 - DNA, 19 bp, Mus musculus
  siRNA target sequence for Thrap5 (NM_198107.1,778-796).
gcgtcacccgtgaagttct

SEQ ID NO: 811872 - DNA, 19 bp, Mus musculus
  siRNA target sequence for Thrap5 (NM_198107.1,779-797).
cgtcacccgtgaagttcta

SEQ ID NO: 811873 - DNA, 19 bp, Mus musculus
  siRNA target sequence for Thrap5 (NM_198107.1,780-798).
gtcacccgtgaagttctat

SEQ ID NO: 811874 - DNA, 19 bp, Mus musculus
  siRNA target sequence for Thrap5 (NM_198107.1,1016-1034).
gccttcctgtgaacaatat

SEQ ID NO: 811875 - DNA, 19 bp, Mus musculus
  siRNA target sequence for Thrap5 (NM_198107.1,1052-1070).
ctgtggttggtgacaaaca

SEQ ID NO: 811876 - DNA, 19 bp, Mus musculus
  siRNA target sequence for Thrap5 (NM_198107.1,1184-1202).
ccagtgacacccagttcta

SEQ ID NO: 811877 - DNA, 19 bp, Mus musculus
  siRNA target sequence for Thrap5 (NM_198107.1,1185-1203).
cagtgacacccagttctat

SEQ ID NO: 811878 - DNA, 19 bp, Mus musculus
  siRNA target sequence for Thrap5 (NM_198107.1,1343-1361).
catgccctgccgtacactt

SEQ ID NO: 811879 - DNA, 19 bp, Mus musculus
  siRNA target sequence for Thrap5 (NM_198107.1,1346-1364).
gccctgccgtacactttaa

SEQ ID NO: 811880 - DNA, 19 bp, Mus musculus
  siRNA target sequence for Thrap5 (NM_198107.1,1347-1365).
ccctgccgtacactttaaa

SEQ ID NO: 811881 - DNA, 19 bp, Mus musculus
  siRNA target sequence for Thrap5 (NM_198107.1,1393-1411).
gccctcgtgggcatcgata

SEQ ID NO: 811882 - DNA, 19 bp, Mus musculus
  siRNA target sequence for Thrap5 (NM_198107.1,1398-1416).
cgtgggcatcgataaccat

SEQ ID NO: 811883 - DNA, 19 bp, Mus musculus
  siRNA target sequence for Thrap5 (NM_198107.1,1425-1443).
cagcatgctgcgaatctct

SEQ ID NO: 811884 - DNA, 19 bp, Mus musculus
  siRNA target sequence for Thrap5 (NM_198107.1,1837-1855).
gttgacatcgacaaagtca

SEQ ID NO: 811885 - DNA, 19 bp, Mus musculus
  siRNA target sequence for Thrap5 (NM_198107.1,2027-2045).
gcatgctgcgagagttgat

SEQ ID NO: 811886 - DNA, 19 bp, Mus musculus
  siRNA target sequence for Thrap5 (NM_198107.1,2140-2158).
cgactgctcaccaaactgt

SEQ ID NO: 811887 - DNA, 19 bp, Mus musculus
  siRNA target sequence for Thrap5 (NM_198107.1,2488-2506).
ctgaagtctcccaacaaga

SEQ ID NO: 811888 - DNA, 19 bp, Mus musculus
  siRNA target sequence for Thrap5 (NM_198107.1,2527-2545).
gaacagcggtggatcaaga

SEQ ID NO: 811889 - DNA, 19 bp, Mus musculus
  siRNA target sequence for BC023055 (NM_198108.1,589-607).
cctgaccaaaggttccttt

SEQ ID NO: 811890 - DNA, 19 bp, Mus musculus
  siRNA target sequence for BC023055 (NM_198108.1,594-612).
ccaaaggttcctttaccta

SEQ ID NO: 811891 - DNA, 19 bp, Mus musculus
  siRNA target sequence for BC023055 (NM_198108.1,709-727).
cttcgagaatgggcttttt

SEQ ID NO: 811892 - DNA, 19 bp, Mus musculus
  siRNA target sequence for BC023055 (NM_198108.1,803-821).
gtcggagtcttcattcgat

SEQ ID NO: 811893 - DNA, 19 bp, Mus musculus
  siRNA target sequence for BC023055 (NM_198108.1,805-823).
cggagtcttcattcgatat

SEQ ID NO: 811894 - DNA, 19 bp, Mus musculus
  siRNA target sequence for BC023055 (NM_198108.1,923-941).
ggtctgttcgagaacaaca

SEQ ID NO: 811895 - DNA, 19 bp, Mus musculus
  siRNA target sequence for BC023055 (NM_198108.1,924-942).
gtctgttcgagaacaacaa

SEQ ID NO: 811896 - DNA, 19 bp, Mus musculus
  siRNA target sequence for BC023055 (NM_198108.1,947-965).
ctgcggcgtgagaagtgtt

SEQ ID NO: 811897 - DNA, 19 bp, Mus musculus
  siRNA target sequence for mSSH-1L (NM_198109.1,437-455).
ctgcacgatcggaatggtt

SEQ ID NO: 811898 - DNA, 19 bp, Mus musculus
  siRNA target sequence for mSSH-1L (NM_198109.1,466-484).
ggagcgacaccaagattca

SEQ ID NO: 811899 - DNA, 19 bp, Mus musculus
  siRNA target sequence for mSSH-1L (NM_198109.1,519-537).
gcgggcaggatgcacatat

SEQ ID NO: 811900 - DNA, 19 bp, Mus musculus
  siRNA target sequence for mSSH-1L (NM_198109.1,520-538).
cgggcaggatgcacatatt

SEQ ID NO: 811901 - DNA, 19 bp, Mus musculus
  siRNA target sequence for mSSH-1L (NM_198109.1,522-540).
ggcaggatgcacatattca

SEQ ID NO: 811902 - DNA, 19 bp, Mus musculus
  siRNA target sequence for mSSH-1L (NM_198109.1,523-541).
gcaggatgcacatattcaa

SEQ ID NO: 811903 - DNA, 19 bp, Mus musculus
  siRNA target sequence for mSSH-1L (NM_198109.1,571-589).
ccctgcaagtgcttcacaa

SEQ ID NO: 811904 - DNA, 19 bp, Mus musculus
  siRNA target sequence for mSSH-1L (NM_198109.1,641-659).
catctgggccacctactat

SEQ ID NO: 811905 - DNA, 19 bp, Mus musculus
  siRNA target sequence for mSSH-1L (NM_198109.1,762-780).
ccaaccgagggcgaaagaa

SEQ ID NO: 811906 - DNA, 19 bp, Mus musculus
  siRNA target sequence for mSSH-1L (NM_198109.1,821-839).
gagccaggaccttgaaaat

SEQ ID NO: 811907 - DNA, 19 bp, Mus musculus
  siRNA target sequence for mSSH-1L (NM_198109.1,823-841).
gccaggaccttgaaaatgt

SEQ ID NO: 811908 - DNA, 19 bp, Mus musculus
  siRNA target sequence for BC020354 (NM_198110.1,138-156).
ggttccaaaggctgtaaga

SEQ ID NO: 811909 - DNA, 19 bp, Mus musculus
  siRNA target sequence for BC020354 (NM_198110.1,199-217).
catctgctccccagattgt

SEQ ID NO: 811910 - DNA, 19 bp, Mus musculus
  siRNA target sequence for BC020354 (NM_198110.1,202-220).
ctgctccccagattgttca

SEQ ID NO: 811911 - DNA, 19 bp, Mus musculus
  siRNA target sequence for BC020354 (NM_198110.1,236-254).
cagtcgcgaggccgaatta

SEQ ID NO: 811912 - DNA, 19 bp, Mus musculus
  siRNA target sequence for BC020354 (NM_198110.1,238-256).
gtcgcgaggccgaattaaa

SEQ ID NO: 811913 - DNA, 19 bp, Mus musculus
  siRNA target sequence for BC020354 (NM_198110.1,241-259).
gcgaggccgaattaaagaa

SEQ ID NO: 811914 - DNA, 19 bp, Mus musculus
  siRNA target sequence for BC020354 (NM_198110.1,246-264).
gccgaattaaagaagaaaa

SEQ ID NO: 811915 - DNA, 19 bp, Mus musculus
  siRNA target sequence for BC020354 (NM_198110.1,386-404).
ggaagttttgcaggaatta

SEQ ID NO: 811916 - DNA, 19 bp, Mus musculus
  siRNA target sequence for BC020354 (NM_198110.1,387-405).
gaagttttgcaggaattaa

SEQ ID NO: 811917 - DNA, 19 bp, Mus musculus
  siRNA target sequence for BC020354 (NM_198110.1,433-451).
ccacaaggaaggcctatta

SEQ ID NO: 811918 - DNA, 19 bp, Mus musculus
  siRNA target sequence for BC020354 (NM_198110.1,436-454).
caaggaaggcctattacaa

SEQ ID NO: 811919 - DNA, 19 bp, Mus musculus
  siRNA target sequence for BC020354 (NM_198110.1,558-576).
cgtgcagaaggcaacaaga

SEQ ID NO: 811920 - DNA, 19 bp, Mus musculus
  siRNA target sequence for BC020354 (NM_198110.1,584-602).
cttggtcttaaataagata

SEQ ID NO: 811921 - DNA, 19 bp, Mus musculus
  siRNA target sequence for BC020354 (NM_198110.1,707-725).
cttgactcgttgtaaagtt

SEQ ID NO: 811922 - DNA, 19 bp, Mus musculus
  siRNA target sequence for BC020354 (NM_198110.1,836-854).
cattcgtgtgggtgttgta

SEQ ID NO: 811923 - DNA, 19 bp, Mus musculus
  siRNA target sequence for BC020354 (NM_198110.1,872-890).
gaagagcagtctgatcaat

SEQ ID NO: 811924 - DNA, 19 bp, Mus musculus
  siRNA target sequence for BC020354 (NM_198110.1,899-917).
gcgcagccgtgcttgtagt

SEQ ID NO: 811925 - DNA, 19 bp, Mus musculus
  siRNA target sequence for BC020354 (NM_198110.1,956-974).
ggtctacctagacaagttt

SEQ ID NO: 811926 - DNA, 19 bp, Mus musculus
  siRNA target sequence for BC020354 (NM_198110.1,957-975).
gtctacctagacaagttta

SEQ ID NO: 811927 - DNA, 19 bp, Mus musculus
  siRNA target sequence for BC020354 (NM_198110.1,1026-1044).
ggcaccatcctgcgtaatt

SEQ ID NO: 811928 - DNA, 19 bp, Mus musculus
  siRNA target sequence for BC020354 (NM_198110.1,1124-1142).
cagctactatggtgtatct

SEQ ID NO: 811929 - DNA, 19 bp, Mus musculus
  siRNA target sequence for BC020354 (NM_198110.1,1180-1198).
cccatcgcttgggaaagaa

SEQ ID NO: 811930 - DNA, 19 bp, Mus musculus
  siRNA target sequence for BC020354 (NM_198110.1,1182-1200).
catcgcttgggaaagaaga

SEQ ID NO: 811931 - DNA, 19 bp, Mus musculus
  siRNA target sequence for BC020354 (NM_198110.1,1199-1217).
gaagaagggaggtgtatat

SEQ ID NO: 811932 - DNA, 19 bp, Mus musculus
  siRNA target sequence for BC020354 (NM_198110.1,1202-1220).
gaagggaggtgtatatagt

SEQ ID NO: 811933 - DNA, 19 bp, Mus musculus
  siRNA target sequence for BC020354 (NM_198110.1,1343-1361).
gactgaggtctttgatata

SEQ ID NO: 811934 - DNA, 19 bp, Mus musculus
  siRNA target sequence for BC020354 (NM_198110.1,1349-1367).
ggtctttgatatagaagat

SEQ ID NO: 811935 - DNA, 19 bp, Mus musculus
  siRNA target sequence for BC020354 (NM_198110.1,1350-1368).
gtctttgatatagaagata

SEQ ID NO: 811936 - DNA, 19 bp, Mus musculus
  siRNA target sequence for BC020354 (NM_198110.1,1470-1488).
cattctccactggtgaaaa

SEQ ID NO: 811937 - DNA, 19 bp, Mus musculus
  siRNA target sequence for BC020354 (NM_198110.1,1510-1528).
gaagcaccgtgtataagat

SEQ ID NO: 811938 - DNA, 19 bp, Mus musculus
  siRNA target sequence for BC020354 (NM_198110.1,1538-1556).
cactgggtattgtaccaaa

SEQ ID NO: 811939 - DNA, 19 bp, Mus musculus
  siRNA target sequence for BC020354 (NM_198110.1,1543-1561).
ggtattgtaccaaaccaaa

SEQ ID NO: 811940 - DNA, 19 bp, Mus musculus
  siRNA target sequence for BC020354 (NM_198110.1,1552-1570).
ccaaaccaaaccgtaatca

SEQ ID NO: 811941 - DNA, 19 bp, Mus musculus
  siRNA target sequence for BC020354 (NM_198110.1,1610-1628).
ccaaaataaccgtgtagta

SEQ ID NO: 811942 - DNA, 19 bp, Mus musculus
  siRNA target sequence for BC020354 (NM_198110.1,1706-1724).
ggcatctgccttgaagaat

SEQ ID NO: 811943 - DNA, 19 bp, Mus musculus
  siRNA target sequence for BC020354 (NM_198110.1,1736-1754).
gcagaagcgttcagataaa

SEQ ID NO: 811944 - DNA, 19 bp, Mus musculus
  siRNA target sequence for BC020354 (NM_198110.1,1737-1755).
cagaagcgttcagataaaa

SEQ ID NO: 811945 - DNA, 19 bp, Mus musculus
  siRNA target sequence for BC020354 (NM_198110.1,1749-1767).
gataaaatcgccactaagt

SEQ ID NO: 811946 - DNA, 19 bp, Mus musculus
  siRNA target sequence for LOC239790 (NM_198112.1,235-253).
gctcctgcgtcttgatgat

SEQ ID NO: 811947 - DNA, 19 bp, Mus musculus
  siRNA target sequence for LOC239790 (NM_198112.1,261-279).
ccttagagaatgacgtatt

SEQ ID NO: 811948 - DNA, 19 bp, Mus musculus
  siRNA target sequence for LOC239790 (NM_198112.1,266-284).
gagaatgacgtatttgaga

SEQ ID NO: 811949 - DNA, 19 bp, Mus musculus
  siRNA target sequence for LOC239790 (NM_198112.1,370-388).
gaaagcagtagatcattca

SEQ ID NO: 811950 - DNA, 19 bp, Mus musculus
  siRNA target sequence for LOC239790 (NM_198112.1,374-392).
gcagtagatcattcaaaaa

SEQ ID NO: 811951 - DNA, 19 bp, Mus musculus
  siRNA target sequence for LOC239790 (NM_198112.1,387-405).
caaaaaagcggtttggtat

SEQ ID NO: 811952 - DNA, 19 bp, Mus musculus
  siRNA target sequence for LOC239790 (NM_198112.1,407-425).
cccatggatcggattggta

SEQ ID NO: 811953 - DNA, 19 bp, Mus musculus
  siRNA target sequence for mSSH-3L (NM_198113.1,350-368).
ccagagtccctggaaacaa

SEQ ID NO: 811954 - DNA, 19 bp, Mus musculus
  siRNA target sequence for mSSH-3L (NM_198113.1,468-486).
cgctacctgctggtagtat

SEQ ID NO: 811955 - DNA, 19 bp, Mus musculus
  siRNA target sequence for mSSH-3L (NM_198113.1,640-658).
gtggtcaaagccgaatctt

SEQ ID NO: 811956 - DNA, 19 bp, Mus musculus
  siRNA target sequence for mSSH-3L (NM_198113.1,642-660).
ggtcaaagccgaatcttca

SEQ ID NO: 811957 - DNA, 19 bp, Mus musculus
  siRNA target sequence for mSSH-3L (NM_198113.1,685-703).
gggccacactgcaggtatt

SEQ ID NO: 811958 - DNA, 19 bp, Mus musculus
  siRNA target sequence for mSSH-3L (NM_198113.1,688-706).
ccacactgcaggtattgca

SEQ ID NO: 811959 - DNA, 19 bp, Mus musculus
  siRNA target sequence for mSSH-3L (NM_198113.1,801-819).
cagggttgcctcaatgagt

SEQ ID NO: 811960 - DNA, 19 bp, Mus musculus
  siRNA target sequence for mSSH-3L (NM_198113.1,842-860).
gtcctttcgaccacctaat

SEQ ID NO: 811961 - DNA, 19 bp, Mus musculus
  siRNA target sequence for mSSH-3L (NM_198113.1,845-863).
ctttcgaccacctaatgct

SEQ ID NO: 811962 - DNA, 19 bp, Mus musculus
  siRNA target sequence for mSSH-3L (NM_198113.1,903-921).
gcgatcctggctgaattgt

SEQ ID NO: 811963 - DNA, 19 bp, Mus musculus
  siRNA target sequence for mSSH-3L (NM_198113.1,1010-1028).
gcagtaccgtgactttatt

SEQ ID NO: 811964 - DNA, 19 bp, Mus musculus
  siRNA target sequence for mSSH-3L (NM_198113.1,1170-1188).
cgggagattgacaacttct

SEQ ID NO: 811965 - DNA, 19 bp, Mus musculus
  siRNA target sequence for mSSH-3L (NM_198113.1,1191-1209).
cctgagcgcttcacctatt

SEQ ID NO: 811966 - DNA, 19 bp, Mus musculus
  siRNA target sequence for mSSH-3L (NM_198113.1,1192-1210).
ctgagcgcttcacctatta

SEQ ID NO: 811967 - DNA, 19 bp, Mus musculus
  siRNA target sequence for mSSH-3L (NM_198113.1,1194-1212).
gagcgcttcacctattaca

SEQ ID NO: 811968 - DNA, 19 bp, Mus musculus
  siRNA target sequence for mSSH-3L (NM_198113.1,1196-1214).
gcgcttcacctattacaat

SEQ ID NO: 811969 - DNA, 19 bp, Mus musculus
  siRNA target sequence for mSSH-3L (NM_198113.1,1198-1216).
gcttcacctattacaatgt

SEQ ID NO: 811970 - DNA, 19 bp, Mus musculus
  siRNA target sequence for mSSH-3L (NM_198113.1,1258-1276).
ggaaggagacacatcgatt

SEQ ID NO: 811971 - DNA, 19 bp, Mus musculus
  siRNA target sequence for mSSH-3L (NM_198113.1,1262-1280).
ggagacacatcgattcatt

SEQ ID NO: 811972 - DNA, 19 bp, Mus musculus
  siRNA target sequence for mSSH-3L (NM_198113.1,1306-1324).
gggtgctagtccactgtaa

SEQ ID NO: 811973 - DNA, 19 bp, Mus musculus
  siRNA target sequence for mSSH-3L (NM_198113.1,1308-1326).
gtgctagtccactgtaaga

SEQ ID NO: 811974 - DNA, 19 bp, Mus musculus
  siRNA target sequence for mSSH-3L (NM_198113.1,1360-1378).
cctatgccatgaaacagta

SEQ ID NO: 811975 - DNA, 19 bp, Mus musculus
  siRNA target sequence for mSSH-3L (NM_198113.1,1361-1379).
ctatgccatgaaacagtat

SEQ ID NO: 811976 - DNA, 19 bp, Mus musculus
  siRNA target sequence for mSSH-3L (NM_198113.1,1544-1562).
gcccctggcgcctgaagtt

SEQ ID NO: 811977 - DNA, 19 bp, Mus musculus
  siRNA target sequence for mSSH-3L (NM_198113.1,1548-1566).
ctggcgcctgaagtttcta

SEQ ID NO: 811978 - DNA, 19 bp, Mus musculus
  siRNA target sequence for mSSH-3L (NM_198113.1,1550-1568).
ggcgcctgaagtttctaca

SEQ ID NO: 811979 - DNA, 19 bp, Mus musculus
  siRNA target sequence for mSSH-3L (NM_198113.1,1603-1621).
gtggggaggtgatggtaat

SEQ ID NO: 811980 - DNA, 19 bp, Mus musculus
  siRNA target sequence for Nsddr (NM_198114.1,118-136).
ctcttcggcttggtctata

SEQ ID NO: 811981 - DNA, 19 bp, Mus musculus
  siRNA target sequence for Nsddr (NM_198114.1,214-232).
gccgaaatggctatcatct

SEQ ID NO: 811982 - DNA, 19 bp, Mus musculus
  siRNA target sequence for Nsddr (NM_198114.1,307-325).
gccatcttggtgattgagt

SEQ ID NO: 811983 - DNA, 19 bp, Mus musculus
  siRNA target sequence for Nsddr (NM_198114.1,635-653).
cagatgcctactcagaaat

SEQ ID NO: 811984 - DNA, 19 bp, Mus musculus
  siRNA target sequence for Nsddr (NM_198114.1,766-784).
gacgaggcaaacaatgaca

SEQ ID NO: 811985 - DNA, 19 bp, Mus musculus
  siRNA target sequence for Nsddr (NM_198114.1,852-870).
cgagatgctacgctacaaa

SEQ ID NO: 811986 - DNA, 19 bp, Mus musculus
  siRNA target sequence for Nsddr (NM_198114.1,855-873).
gatgctacgctacaaagaa

SEQ ID NO: 811987 - DNA, 19 bp, Mus musculus
  siRNA target sequence for Nsddr (NM_198114.1,1083-1101).
gaacatgactgctgtagat

SEQ ID NO: 811988 - DNA, 19 bp, Mus musculus
  siRNA target sequence for Nsddr (NM_198114.1,1091-1109).
ctgctgtagatattgtcta

SEQ ID NO: 811989 - DNA, 19 bp, Mus musculus
  siRNA target sequence for Nsddr (NM_198114.1,1120-1138).
cacgatgcggtctatgaaa

SEQ ID NO: 811990 - DNA, 19 bp, Mus musculus
  siRNA target sequence for Nsddr (NM_198114.1,1122-1140).
cgatgcggtctatgaaact

SEQ ID NO: 811991 - DNA, 19 bp, Mus musculus
  siRNA target sequence for Nsddr (NM_198114.1,1368-1386).
cctgggccgtggaaccaaa

SEQ ID NO: 811992 - DNA, 19 bp, Mus musculus
  siRNA target sequence for Nsddr (NM_198114.1,1499-1517).
caggaggcctgctaagtga

SEQ ID NO: 811993 - DNA, 19 bp, Mus musculus
  siRNA target sequence for Nsddr (NM_198114.1,1514-1532).
gtgaggatgctatggaata

SEQ ID NO: 811994 - DNA, 19 bp, Mus musculus
  siRNA target sequence for Nsddr (NM_198114.1,1527-1545).
ggaatactccaaagagttt

SEQ ID NO: 811995 - DNA, 19 bp, Mus musculus
  siRNA target sequence for Nsddr (NM_198114.1,1890-1908).
catctggggcgacaataaa

SEQ ID NO: 811996 - DNA, 19 bp, Mus musculus
  siRNA target sequence for Nsddr (NM_198114.1,1898-1916).
gcgacaataaagcctttaa

SEQ ID NO: 811997 - DNA, 19 bp, Mus musculus
  siRNA target sequence for Nsddr (NM_198114.1,2880-2898).
cttgcttcgggctcagttt

SEQ ID NO: 811998 - DNA, 19 bp, Mus musculus
  siRNA target sequence for LOC378878 (NM_198118.1,923-941).
gacagagcccagactctat

SEQ ID NO: 811999 - DNA, 19 bp, Mus musculus
  siRNA target sequence for LOC378878 (NM_198118.1,927-945).
gagcccagactctattcca

SEQ ID NO: 812000 - DNA, 19 bp, Mus musculus
  siRNA target sequence for LOC378878 (NM_198118.1,929-947).
gcccagactctattccata

SEQ ID NO: 812001 - DNA, 19 bp, Mus musculus
  siRNA target sequence for LOC378878 (NM_198118.1,983-1001).
gcacggagacacctacata

SEQ ID NO: 812002 - DNA, 19 bp, Mus musculus
  siRNA target sequence for LOC378878 (NM_198118.1,984-1002).
cacggagacacctacatat

SEQ ID NO: 812003 - DNA, 19 bp, Mus musculus
  siRNA target sequence for LOC378878 (NM_198118.1,1056-1074).
gcctggttctctgatgaaa

SEQ ID NO: 812004 - DNA, 19 bp, Mus musculus
  siRNA target sequence for LOC378878 (NM_198118.1,1126-1144).
cacaactcctgaacattta

SEQ ID NO: 812005 - DNA, 19 bp, Mus musculus
  siRNA target sequence for LOC378878 (NM_198118.1,1153-1171).
cggatgtcctgtttcctta

SEQ ID NO: 812006 - DNA, 19 bp, Mus musculus
  siRNA target sequence for LOC378878 (NM_198118.1,1154-1172).
ggatgtcctgtttccttat

SEQ ID NO: 812007 - DNA, 19 bp, Mus musculus
  siRNA target sequence for LOC378878 (NM_198118.1,1181-1199).
cccacttctgctgtttgta

SEQ ID NO: 812008 - DNA, 19 bp, Mus musculus
  siRNA target sequence for LOC378878 (NM_198118.1,1182-1200).
ccacttctgctgtttgtat

SEQ ID NO: 812009 - DNA, 19 bp, Mus musculus
  siRNA target sequence for 6430402H13Rik (NM_198119.1,274-292).
ctactgctggggttattgt

SEQ ID NO: 812010 - DNA, 19 bp, Mus musculus
  siRNA target sequence for 6430402H13Rik (NM_198119.1,428-446).
cactgttcctgcaagacaa

SEQ ID NO: 812011 - DNA, 19 bp, Mus musculus
  siRNA target sequence for 6430402H13Rik (NM_198119.1,704-722).
cgcgactacaggaacttca

SEQ ID NO: 812012 - DNA, 19 bp, Mus musculus
  siRNA target sequence for 6430402H13Rik (NM_198119.1,705-723).
gcgactacaggaacttcat

SEQ ID NO: 812013 - DNA, 19 bp, Mus musculus
  siRNA target sequence for 6430402H13Rik (NM_198119.1,707-725).
gactacaggaacttcatct

SEQ ID NO: 812014 - DNA, 19 bp, Mus musculus
  siRNA target sequence for 6430402H13Rik (NM_198119.1,1000-1018).
cagagtctactagaagtat

SEQ ID NO: 812015 - DNA, 19 bp, Mus musculus
  siRNA target sequence for 6430402H13Rik (NM_198119.1,1157-1175).
cccagcctcgcgatggtaa

SEQ ID NO: 812016 - DNA, 19 bp, Mus musculus
  siRNA target sequence for 6430402H13Rik (NM_198119.1,1224-1242).
gcacggcacccgagatact

SEQ ID NO: 812017 - DNA, 19 bp, Mus musculus
  siRNA target sequence for 6430402H13Rik (NM_198119.1,1282-1300).
cacgcaggcaagtacgaat

SEQ ID NO: 812018 - DNA, 19 bp, Mus musculus
  siRNA target sequence for 6430402H13Rik (NM_198119.1,1331-1349).
gagtgccctttcatctact

SEQ ID NO: 812019 - DNA, 19 bp, Mus musculus
  siRNA target sequence for 6430402H13Rik (NM_198119.1,1511-1529).
cgctcaccgcgctgttgtt

SEQ ID NO: 812020 - DNA, 19 bp, Mus musculus
  siRNA target sequence for 6430402H13Rik (NM_198119.1,1595-1613).
ccctatttgtcaacgatta

SEQ ID NO: 812021 - DNA, 19 bp, Mus musculus
  siRNA target sequence for 6430402H13Rik (NM_198119.1,1596-1614).
cctatttgtcaacgattat

SEQ ID NO: 812022 - DNA, 19 bp, Mus musculus
  siRNA target sequence for 6430402H13Rik (NM_198119.1,1786-1804).
gtggcctatgagatccatt

SEQ ID NO: 812023 - DNA, 19 bp, Mus musculus
  siRNA target sequence for Rbp1l1 (NM_198122.1,1863-1881).
cgatctggatatgatgaat

SEQ ID NO: 812024 - DNA, 19 bp, Mus musculus
  siRNA target sequence for Rbp1l1 (NM_198122.1,1867-1885).
ctggatatgatgaatggat

SEQ ID NO: 812025 - DNA, 19 bp, Mus musculus
  siRNA target sequence for Abi2 (NM_198127.1,139-157).
gagccctagaagaaaccaa

SEQ ID NO: 812026 - DNA, 19 bp, Mus musculus
  siRNA target sequence for Abi2 (NM_198127.1,160-178).
cctacaccactcaatcctt

SEQ ID NO: 812027 - DNA, 19 bp, Mus musculus
  siRNA target sequence for Abi2 (NM_198127.1,161-179).
ctacaccactcaatcctta

SEQ ID NO: 812028 - DNA, 19 bp, Mus musculus
  siRNA target sequence for Abi2 (NM_198127.1,180-198).
gcaagtgttgcgtatctga

SEQ ID NO: 812029 - DNA, 19 bp, Mus musculus
  siRNA target sequence for Abi2 (NM_198127.1,184-202).
gtgttgcgtatctgataaa

SEQ ID NO: 812030 - DNA, 19 bp, Mus musculus
  siRNA target sequence for Abi2 (NM_198127.1,186-204).
gttgcgtatctgataaaca

SEQ ID NO: 812031 - DNA, 19 bp, Mus musculus
  siRNA target sequence for Abi2 (NM_198127.1,264-282).
gagtcttcaatcaaccata

SEQ ID NO: 812032 - DNA, 19 bp, Mus musculus
  siRNA target sequence for Abi2 (NM_198127.1,266-284).
gtcttcaatcaaccatatt

SEQ ID NO: 812033 - DNA, 19 bp, Mus musculus
  siRNA target sequence for Abi2 (NM_198127.1,271-289).
caatcaaccatatttcaca

SEQ ID NO: 812034 - DNA, 19 bp, Mus musculus
  siRNA target sequence for Abi2 (NM_198127.1,275-293).
caaccatatttcacaaaca

SEQ ID NO: 812035 - DNA, 19 bp, Mus musculus
  siRNA target sequence for Abi2 (NM_198127.1,278-296).
ccatatttcacaaacagtt

SEQ ID NO: 812036 - DNA, 19 bp, Mus musculus
  siRNA target sequence for Abi2 (NM_198127.1,311-329).
gaaggttgcaagaagagaa

SEQ ID NO: 812037 - DNA, 19 bp, Mus musculus
  siRNA target sequence for Abi2 (NM_198127.1,361-379).
caaggacccataagattat

SEQ ID NO: 812038 - DNA, 19 bp, Mus musculus
  siRNA target sequence for Abi2 (NM_198127.1,396-414).
gagcggccagttcgttata

SEQ ID NO: 812039 - DNA, 19 bp, Mus musculus
  siRNA target sequence for Abi2 (NM_198127.1,398-416).
gcggccagttcgttatatt

SEQ ID NO: 812040 - DNA, 19 bp, Mus musculus
  siRNA target sequence for Abi2 (NM_198127.1,401-419).
gccagttcgttatattcga

SEQ ID NO: 812041 - DNA, 19 bp, Mus musculus
  siRNA target sequence for Abi2 (NM_198127.1,402-420).
ccagttcgttatattcgaa

SEQ ID NO: 812042 - DNA, 19 bp, Mus musculus
  siRNA target sequence for Abi2 (NM_198127.1,403-421).
cagttcgttatattcgaaa

SEQ ID NO: 812043 - DNA, 19 bp, Mus musculus
  siRNA target sequence for Abi2 (NM_198127.1,408-426).
cgttatattcgaaaaccta

SEQ ID NO: 812044 - DNA, 19 bp, Mus musculus
  siRNA target sequence for Abi2 (NM_198127.1,423-441).
cctattgactacacaattt

SEQ ID NO: 812045 - DNA, 19 bp, Mus musculus
  siRNA target sequence for Abi2 (NM_198127.1,424-442).
ctattgactacacaatttt

SEQ ID NO: 812046 - DNA, 19 bp, Mus musculus
  siRNA target sequence for Abi2 (NM_198127.1,468-486).
gtgagtacccagaatatga

SEQ ID NO: 812047 - DNA, 19 bp, Mus musculus
  siRNA target sequence for Abi2 (NM_198127.1,567-585).
cggcactccccctatcgaa

SEQ ID NO: 812048 - DNA, 19 bp, Mus musculus
  siRNA target sequence for Abi2 (NM_198127.1,606-624).
ccagtggtaccaaatgatt

SEQ ID NO: 812049 - DNA, 19 bp, Mus musculus
  siRNA target sequence for Abi2 (NM_198127.1,611-629).
ggtaccaaatgattacgta

SEQ ID NO: 812050 - DNA, 19 bp, Mus musculus
  siRNA target sequence for Abi2 (NM_198127.1,630-648).
cctagcccaacccgtaata

SEQ ID NO: 812051 - DNA, 19 bp, Mus musculus
  siRNA target sequence for Abi2 (NM_198127.1,631-649).
ctagcccaacccgtaatat

SEQ ID NO: 812052 - DNA, 19 bp, Mus musculus
  siRNA target sequence for Abi2 (NM_198127.1,677-695).
gacagcttctgtgaatcaa

SEQ ID NO: 812053 - DNA, 19 bp, Mus musculus
  siRNA target sequence for Abi2 (NM_198127.1,687-705).
gtgaatcaaagaaatcgaa

SEQ ID NO: 812054 - DNA, 19 bp, Mus musculus
  siRNA target sequence for Abi2 (NM_198127.1,693-711).
caaagaaatcgaacttaca

SEQ ID NO: 812055 - DNA, 19 bp, Mus musculus
  siRNA target sequence for Abi2 (NM_198127.1,838-856).
gtcatcctgttcagttcta

SEQ ID NO: 812056 - DNA, 19 bp, Mus musculus
  siRNA target sequence for Abi2 (NM_198127.1,880-898).
gccatacaccacctacaat

SEQ ID NO: 812057 - DNA, 19 bp, Mus musculus
  siRNA target sequence for Abi2 (NM_198127.1,881-899).
ccatacaccacctacaata

SEQ ID NO: 812058 - DNA, 19 bp, Mus musculus
  siRNA target sequence for Abi2 (NM_198127.1,902-920).
gggctcgttgccctataga

SEQ ID NO: 812059 - DNA, 19 bp, Mus musculus
  siRNA target sequence for Abi2 (NM_198127.1,921-939).
cgtcctccttccataacgt

SEQ ID NO: 812060 - DNA, 19 bp, Mus musculus
  siRNA target sequence for Abi2 (NM_198127.1,927-945).
ccttccataacgtcacaaa

SEQ ID NO: 812061 - DNA, 19 bp, Mus musculus
  siRNA target sequence for Abi2 (NM_198127.1,962-980).
gatgaatggaggtcctttt

SEQ ID NO: 812062 - DNA, 19 bp, Mus musculus
  siRNA target sequence for Abi2 (NM_198127.1,1032-1050).
gagccagtctttgatgaat

SEQ ID NO: 812063 - DNA, 19 bp, Mus musculus
  siRNA target sequence for Abi2 (NM_198127.1,1149-1167).
ccaagggcttacttggaaa

SEQ ID NO: 812064 - DNA, 19 bp, Mus musculus
  siRNA target sequence for Abi2 (NM_198127.1,1154-1172).
ggcttacttggaaaaggtt

SEQ ID NO: 812065 - DNA, 19 bp, Mus musculus
  siRNA target sequence for Abi2 (NM_198127.1,1169-1187).
ggttgtggcaatttatgat

SEQ ID NO: 812066 - DNA, 19 bp, Mus musculus
  siRNA target sequence for Abi2 (NM_198127.1,1175-1193).
ggcaatttatgattataca

SEQ ID NO: 812067 - DNA, 19 bp, Mus musculus
  siRNA target sequence for Abi2 (NM_198127.1,1176-1194).
gcaatttatgattatacaa

SEQ ID NO: 812068 - DNA, 19 bp, Mus musculus
  siRNA target sequence for Abi2 (NM_198127.1,1253-1271).
gaatgacgatggttggtat

SEQ ID NO: 812069 - DNA, 19 bp, Mus musculus
  siRNA target sequence for 5930405J04Rik (NM_198160.1,157-175).
gaaccgccaaccaacaagt

SEQ ID NO: 812070 - DNA, 19 bp, Mus musculus
  siRNA target sequence for 5930405J04Rik (NM_198160.1,239-257).
gcaacgcaccgcttactaa

SEQ ID NO: 812071 - DNA, 19 bp, Mus musculus
  siRNA target sequence for 5930405J04Rik (NM_198160.1,240-258).
caacgcaccgcttactaaa

SEQ ID NO: 812072 - DNA, 19 bp, Mus musculus
  siRNA target sequence for 5930405J04Rik (NM_198160.1,261-279).
gccgatcaaatgtttccta

SEQ ID NO: 812073 - DNA, 19 bp, Mus musculus
  siRNA target sequence for 5930405J04Rik (NM_198160.1,313-331).
cttgcagctgcctacaaat

SEQ ID NO: 812074 - DNA, 19 bp, Mus musculus
  siRNA target sequence for 5930405J04Rik (NM_198160.1,317-335).
cagctgcctacaaattcaa

SEQ ID NO: 812075 - DNA, 19 bp, Mus musculus
  siRNA target sequence for 5930405J04Rik (NM_198160.1,319-337).
gctgcctacaaattcaaga

SEQ ID NO: 812076 - DNA, 19 bp, Mus musculus
  siRNA target sequence for 5930405J04Rik (NM_198160.1,388-406).
cgcaatgtggaaatgttca

SEQ ID NO: 812077 - DNA, 19 bp, Mus musculus
  siRNA target sequence for 5930405J04Rik (NM_198160.1,389-407).
gcaatgtggaaatgttcat

SEQ ID NO: 812078 - DNA, 19 bp, Mus musculus
  siRNA target sequence for 5930405J04Rik (NM_198160.1,441-459).
cctgtcacgacctaacatt

SEQ ID NO: 812079 - DNA, 19 bp, Mus musculus
  siRNA target sequence for 5930405J04Rik (NM_198160.1,442-460).
ctgtcacgacctaacattt

SEQ ID NO: 812080 - DNA, 19 bp, Mus musculus
  siRNA target sequence for 5930405J04Rik (NM_198160.1,548-566).
gcaatgcctcccatgttgt

SEQ ID NO: 812081 - DNA, 19 bp, Mus musculus
  siRNA target sequence for 5930405J04Rik (NM_198160.1,576-594).
cccagggaacctagaagaa

SEQ ID NO: 812082 - DNA, 19 bp, Mus musculus
  siRNA target sequence for 5930405J04Rik (NM_198160.1,602-620).
gggtacggccagtcatgaa

SEQ ID NO: 812083 - DNA, 19 bp, Mus musculus
  siRNA target sequence for 5930405J04Rik (NM_198160.1,604-622).
gtacggccagtcatgaaga

SEQ ID NO: 812084 - DNA, 19 bp, Mus musculus
  siRNA target sequence for 5930405J04Rik (NM_198160.1,681-699).
cccagcgagtgaaattgaa

SEQ ID NO: 812085 - DNA, 19 bp, Mus musculus
  siRNA target sequence for 5930405J04Rik (NM_198160.1,760-778).
ctcgacaccgacacattca

SEQ ID NO: 812086 - DNA, 19 bp, Mus musculus
  siRNA target sequence for 5930405J04Rik (NM_198160.1,862-880).
ctgacagacgaggtaaaca

SEQ ID NO: 812087 - DNA, 19 bp, Mus musculus
  siRNA target sequence for 5930405J04Rik (NM_198160.1,873-891).
ggtaaacagcccagattca

SEQ ID NO: 812088 - DNA, 19 bp, Mus musculus
  siRNA target sequence for 5930405J04Rik (NM_198160.1,988-1006).
ggaccctcaacaccttata

SEQ ID NO: 812089 - DNA, 19 bp, Mus musculus
  siRNA target sequence for 5930405J04Rik (NM_198160.1,1095-1113).
ggtgacactccccaaaaca

SEQ ID NO: 812090 - DNA, 19 bp, Mus musculus
  siRNA target sequence for 5930405J04Rik (NM_198160.1,1112-1130).
cagtcaacactaaaaagga

SEQ ID NO: 812091 - DNA, 19 bp, Mus musculus
  siRNA target sequence for 5930405J04Rik (NM_198160.1,1224-1242).
gaacagcacgggcaacaaa

SEQ ID NO: 812092 - DNA, 19 bp, Mus musculus
  siRNA target sequence for 5930405J04Rik (NM_198160.1,1341-1359).
cagcgtccatgccattgaa

SEQ ID NO: 812093 - DNA, 19 bp, Mus musculus
  siRNA target sequence for 5930405J04Rik (NM_198160.1,1691-1709).
ctgcttcccagcaaatgct

SEQ ID NO: 812094 - DNA, 19 bp, Mus musculus
  siRNA target sequence for 5930405J04Rik (NM_198160.1,1760-1778).
ggctgcgcacagacatgta

SEQ ID NO: 812095 - DNA, 19 bp, Mus musculus
  siRNA target sequence for 5930405J04Rik (NM_198160.1,1762-1780).
ctgcgcacagacatgtaca

SEQ ID NO: 812096 - DNA, 19 bp, Mus musculus
  siRNA target sequence for 5930405J04Rik (NM_198160.1,2120-2138).
ccctagaagagttctcaaa

SEQ ID NO: 812097 - DNA, 19 bp, Mus musculus
  siRNA target sequence for 5930405J04Rik (NM_198160.1,2475-2493).
cggggacccgatagttgat

SEQ ID NO: 812098 - DNA, 19 bp, Mus musculus
  siRNA target sequence for 5930405J04Rik (NM_198160.1,2574-2592).
caaggtggagcgtgacatt

SEQ ID NO: 812099 - DNA, 19 bp, Mus musculus
  siRNA target sequence for 2700087I09Rik (NM_198161.1,162-180).
ctagggcacaggctaaact

SEQ ID NO: 812100 - DNA, 19 bp, Mus musculus
  siRNA target sequence for 2700087I09Rik (NM_198161.1,356-374).
ggagcgagaccagaatcta

SEQ ID NO: 812101 - DNA, 19 bp, Mus musculus
  siRNA target sequence for 2700087I09Rik (NM_198161.1,383-401).
gtaaaaggcacctcagatt

SEQ ID NO: 812102 - DNA, 19 bp, Mus musculus
  siRNA target sequence for 2700087I09Rik (NM_198161.1,432-450).
gatccacacgtaaagataa

SEQ ID NO: 812103 - DNA, 19 bp, Mus musculus
  siRNA target sequence for 2700087I09Rik (NM_198161.1,446-464).
gataagcccagtagtgata

SEQ ID NO: 812104 - DNA, 19 bp, Mus musculus
  siRNA target sequence for 2700087I09Rik (NM_198161.1,482-500).
gaagattctggtattaatt

SEQ ID NO: 812105 - DNA, 19 bp, Mus musculus
  siRNA target sequence for 2700087I09Rik (NM_198161.1,485-503).
gattctggtattaattcct

SEQ ID NO: 812106 - DNA, 19 bp, Mus musculus
  siRNA target sequence for 2700087I09Rik (NM_198161.1,514-532).
gggagaagagcttagtaat

SEQ ID NO: 812107 - DNA, 19 bp, Mus musculus
  siRNA target sequence for 2700087I09Rik (NM_198161.1,518-536).
gaagagcttagtaataatt

SEQ ID NO: 812108 - DNA, 19 bp, Mus musculus
  siRNA target sequence for 2700087I09Rik (NM_198161.1,653-671).
gttattgggaactggtttt

SEQ ID NO: 812109 - DNA, 19 bp, Mus musculus
  siRNA target sequence for 2700087I09Rik (NM_198161.1,678-696).
gcgatgacactggttttga

SEQ ID NO: 812110 - DNA, 19 bp, Mus musculus
  siRNA target sequence for 2700087I09Rik (NM_198161.1,715-733).
gttcaaaatagttaaacct

SEQ ID NO: 812111 - DNA, 19 bp, Mus musculus
  siRNA target sequence for 2700087I09Rik (NM_198161.1,731-749).
cctcagccagtggatgaaa

SEQ ID NO: 812112 - DNA, 19 bp, Mus musculus
  siRNA target sequence for 2700087I09Rik (NM_198161.1,732-750).
ctcagccagtggatgaaat

SEQ ID NO: 812113 - DNA, 19 bp, Mus musculus
  siRNA target sequence for 2700087I09Rik (NM_198161.1,734-752).
cagccagtggatgaaatta

SEQ ID NO: 812114 - DNA, 19 bp, Mus musculus
  siRNA target sequence for 2700087I09Rik (NM_198161.1,773-791).
gactggtccgaggtaacta

SEQ ID NO: 812115 - DNA, 19 bp, Mus musculus
  siRNA target sequence for 2700087I09Rik (NM_198161.1,775-793).
ctggtccgaggtaactata

SEQ ID NO: 812116 - DNA, 19 bp, Mus musculus
  siRNA target sequence for 2700087I09Rik (NM_198161.1,816-834).
ctccagcagtgttaggtta

SEQ ID NO: 812117 - DNA, 19 bp, Mus musculus
  siRNA target sequence for 2700087I09Rik (NM_198161.1,821-839).
gcagtgttaggttatagat

SEQ ID NO: 812118 - DNA, 19 bp, Mus musculus
  siRNA target sequence for 2700087I09Rik (NM_198161.1,861-879).
ggtcctcttcatacattgt

SEQ ID NO: 812119 - DNA, 19 bp, Mus musculus
  siRNA target sequence for 2700087I09Rik (NM_198161.1,874-892).
cattgttctggcctcaaat

SEQ ID NO: 812120 - DNA, 19 bp, Mus musculus
  siRNA target sequence for 2700087I09Rik (NM_198161.1,945-963).
ctatacctgagtatccatt

SEQ ID NO: 812121 - DNA, 19 bp, Mus musculus
  siRNA target sequence for 2700087I09Rik (NM_198161.1,950-968).
cctgagtatccatttggtt

SEQ ID NO: 812122 - DNA, 19 bp, Mus musculus
  siRNA target sequence for 2700087I09Rik (NM_198161.1,955-973).
gtatccatttggttctgat

SEQ ID NO: 812123 - DNA, 19 bp, Mus musculus
  siRNA target sequence for 2700087I09Rik (NM_198161.1,985-1003).
gaccttagatgaaattaga

SEQ ID NO: 812124 - DNA, 19 bp, Mus musculus
  siRNA target sequence for 2700087I09Rik (NM_198161.1,987-1005).
ccttagatgaaattagaca

SEQ ID NO: 812125 - DNA, 19 bp, Mus musculus
  siRNA target sequence for 2700087I09Rik (NM_198161.1,1042-1060).
cttcgcttgcccttgcaaa

SEQ ID NO: 812126 - DNA, 19 bp, Mus musculus
  siRNA target sequence for 2700087I09Rik (NM_198161.1,1116-1134).
caactactgatcctcttat

SEQ ID NO: 812127 - DNA, 19 bp, Mus musculus
  siRNA target sequence for 2700087I09Rik (NM_198161.1,1119-1137).
ctactgatcctcttattca

SEQ ID NO: 812128 - DNA, 19 bp, Mus musculus
  siRNA target sequence for 2700087I09Rik (NM_198161.1,1150-1168).
gattgcaatgggtatacat

SEQ ID NO: 812129 - DNA, 19 bp, Mus musculus
  siRNA target sequence for 2700087I09Rik (NM_198161.1,1155-1173).
caatgggtatacataaggt

SEQ ID NO: 812130 - DNA, 19 bp, Mus musculus
  siRNA target sequence for 2700087I09Rik (NM_198161.1,1207-1225).
gggcgtggtgacacttatt

SEQ ID NO: 812131 - DNA, 19 bp, Mus musculus
  siRNA target sequence for 2700087I09Rik (NM_198161.1,1245-1263).
cttcccctgaggttagtat

SEQ ID NO: 812132 - DNA, 19 bp, Mus musculus
  siRNA target sequence for 2700087I09Rik (NM_198161.1,1248-1266).
cccctgaggttagtattaa

SEQ ID NO: 812133 - DNA, 19 bp, Mus musculus
  siRNA target sequence for 2700087I09Rik (NM_198161.1,1251-1269).
ctgaggttagtattaaaaa

SEQ ID NO: 812134 - DNA, 19 bp, Mus musculus
  siRNA target sequence for 2700087I09Rik (NM_198161.1,1309-1327).
caacaaggtagagtttcat

SEQ ID NO: 812135 - DNA, 19 bp, Mus musculus
  siRNA target sequence for 2700087I09Rik (NM_198161.1,1312-1330).
caaggtagagtttcatgtt

SEQ ID NO: 812136 - DNA, 19 bp, Mus musculus
  siRNA target sequence for 2700087I09Rik (NM_198161.1,1382-1400).
caatctggattaaagataa

SEQ ID NO: 812137 - DNA, 19 bp, Mus musculus
  siRNA target sequence for 2700087I09Rik (NM_198161.1,1416-1434).
ccgagtctgtccatcacta

SEQ ID NO: 812138 - DNA, 19 bp, Mus musculus
  siRNA target sequence for 2700087I09Rik (NM_198161.1,1435-1453).
cattgtagtcagctacttt

SEQ ID NO: 812139 - DNA, 19 bp, Mus musculus
  siRNA target sequence for 2700087I09Rik (NM_198161.1,1471-1489).
gctgtctcagggaaatcgt

SEQ ID NO: 812140 - DNA, 19 bp, Mus musculus
  siRNA target sequence for 2700087I09Rik (NM_198161.1,1472-1490).
ctgtctcagggaaatcgta

SEQ ID NO: 812141 - DNA, 19 bp, Mus musculus
  siRNA target sequence for 2700087I09Rik (NM_198161.1,1478-1496).
cagggaaatcgtaagacta

SEQ ID NO: 812142 - DNA, 19 bp, Mus musculus
  siRNA target sequence for 2700087I09Rik (NM_198161.1,1488-1506).
gtaagactaggaatcttgt

SEQ ID NO: 812143 - DNA, 19 bp, Mus musculus
  siRNA target sequence for 2700087I09Rik (NM_198161.1,1543-1561).
ggcagccagagatatgata

SEQ ID NO: 812144 - DNA, 19 bp, Mus musculus
  siRNA target sequence for 2700087I09Rik (NM_198161.1,1567-1585).
gaaggcgttagcagcatta

SEQ ID NO: 812145 - DNA, 19 bp, Mus musculus
  siRNA target sequence for 2700087I09Rik (NM_198161.1,1570-1588).
ggcgttagcagcattaaaa

SEQ ID NO: 812146 - DNA, 19 bp, Mus musculus
  siRNA target sequence for 2700087I09Rik (NM_198161.1,1572-1590).
cgttagcagcattaaaact

SEQ ID NO: 812147 - DNA, 19 bp, Mus musculus
  siRNA target sequence for 2700087I09Rik (NM_198161.1,1636-1654).
ggccatctttattaacata

SEQ ID NO: 812148 - DNA, 19 bp, Mus musculus
  siRNA target sequence for 2700087I09Rik (NM_198161.1,1637-1655).
gccatctttattaacataa

SEQ ID NO: 812149 - DNA, 19 bp, Mus musculus
  siRNA target sequence for 2700087I09Rik (NM_198161.1,1651-1669).
cataaaggagcatattaga

SEQ ID NO: 812150 - DNA, 19 bp, Mus musculus
  siRNA target sequence for 2700087I09Rik (NM_198161.1,1668-1686).
gaaagggttcaattgtagt

SEQ ID NO: 812151 - DNA, 19 bp, Mus musculus
  siRNA target sequence for 2700087I09Rik (NM_198161.1,1688-1706).
gtcgatcacttgagttaca

SEQ ID NO: 812152 - DNA, 19 bp, Mus musculus
  siRNA target sequence for 2700087I09Rik (NM_198161.1,1690-1708).
cgatcacttgagttacaat

SEQ ID NO: 812153 - DNA, 19 bp, Mus musculus
  siRNA target sequence for 2700087I09Rik (NM_198161.1,1691-1709).
gatcacttgagttacaata

SEQ ID NO: 812154 - DNA, 19 bp, Mus musculus
  siRNA target sequence for 2700087I09Rik (NM_198161.1,1696-1714).
cttgagttacaatactctt

SEQ ID NO: 812155 - DNA, 19 bp, Mus musculus
  siRNA target sequence for 2700087I09Rik (NM_198161.1,1718-1736).
gccatattccgtgaagtta

SEQ ID NO: 812156 - DNA, 19 bp, Mus musculus
  siRNA target sequence for 2700087I09Rik (NM_198161.1,1719-1737).
ccatattccgtgaagttaa

SEQ ID NO: 812157 - DNA, 19 bp, Mus musculus
  siRNA target sequence for 2700087I09Rik (NM_198161.1,1728-1746).
gtgaagttaaggggattat

SEQ ID NO: 812158 - DNA, 19 bp, Mus musculus
  siRNA target sequence for 2700087I09Rik (NM_198161.1,1733-1751).
gttaaggggattatcgaaa

SEQ ID NO: 812159 - DNA, 19 bp, Mus musculus
  siRNA target sequence for 2700087I09Rik (NM_198161.1,1739-1757).
gggattatcgaaagaatgt

SEQ ID NO: 812160 - DNA, 19 bp, Mus musculus
  siRNA target sequence for 8430403M08Rik (NM_198162.1,344-362).
gggcagtatggcaatggat

SEQ ID NO: 812161 - DNA, 19 bp, Mus musculus
  siRNA target sequence for 8430403M08Rik (NM_198162.1,345-363).
ggcagtatggcaatggatt

SEQ ID NO: 812162 - DNA, 19 bp, Mus musculus
  siRNA target sequence for 8430403M08Rik (NM_198162.1,346-364).
gcagtatggcaatggatta

SEQ ID NO: 812163 - DNA, 19 bp, Mus musculus
  siRNA target sequence for 8430403M08Rik (NM_198162.1,347-365).
cagtatggcaatggattaa

SEQ ID NO: 812164 - DNA, 19 bp, Mus musculus
  siRNA target sequence for 8430403M08Rik (NM_198162.1,507-525).
ctcgaacacgggaacctat

SEQ ID NO: 812165 - DNA, 19 bp, Mus musculus
  siRNA target sequence for 8430403M08Rik (NM_198162.1,556-574).
gacagagcttgtctacaaa

SEQ ID NO: 812166 - DNA, 19 bp, Mus musculus
  siRNA target sequence for 8430403M08Rik (NM_198162.1,558-576).
cagagcttgtctacaaata

SEQ ID NO: 812167 - DNA, 19 bp, Mus musculus
  siRNA target sequence for 8430403M08Rik (NM_198162.1,560-578).
gagcttgtctacaaatact

SEQ ID NO: 812168 - DNA, 19 bp, Mus musculus
  siRNA target sequence for 8430403M08Rik (NM_198162.1,562-580).
gcttgtctacaaatactct

SEQ ID NO: 812169 - DNA, 19 bp, Mus musculus
  siRNA target sequence for 8430403M08Rik (NM_198162.1,642-660).
cactggtgatcatctttaa

SEQ ID NO: 812170 - DNA, 19 bp, Mus musculus
  siRNA target sequence for 8430403M08Rik (NM_198162.1,681-699).
gagagccggaactagacat

SEQ ID NO: 812171 - DNA, 19 bp, Mus musculus
  siRNA target sequence for 8430403M08Rik (NM_198162.1,683-701).
gagccggaactagacataa

SEQ ID NO: 812172 - DNA, 19 bp, Mus musculus
  siRNA target sequence for 8430403M08Rik (NM_198162.1,686-704).
ccggaactagacataatct

SEQ ID NO: 812173 - DNA, 19 bp, Mus musculus
  siRNA target sequence for 8430403M08Rik (NM_198162.1,688-706).
ggaactagacataatctca

SEQ ID NO: 812174 - DNA, 19 bp, Mus musculus
  siRNA target sequence for 8430403M08Rik (NM_198162.1,777-795).
cctatgctgctgtactcta

SEQ ID NO: 812175 - DNA, 19 bp, Mus musculus
  siRNA target sequence for 8430403M08Rik (NM_198162.1,778-796).
ctatgctgctgtactctat

SEQ ID NO: 812176 - DNA, 19 bp, Mus musculus
  siRNA target sequence for 8430403M08Rik (NM_198162.1,803-821).
ccccggatgaggatcttca

SEQ ID NO: 812177 - DNA, 19 bp, Mus musculus
  siRNA target sequence for 8430403M08Rik (NM_198162.1,872-890).
cccaggatgtacaagtata

SEQ ID NO: 812178 - DNA, 19 bp, Mus musculus
  siRNA target sequence for 8430403M08Rik (NM_198162.1,880-898).
gtacaagtatacatcaagt

SEQ ID NO: 812179 - DNA, 19 bp, Mus musculus
  siRNA target sequence for 8430403M08Rik (NM_198162.1,1069-1087).
catcacccttcgtagagaa

SEQ ID NO: 812180 - DNA, 19 bp, Mus musculus
  siRNA target sequence for 8430403M08Rik (NM_198162.1,1136-1154).
gaacccaaggaacttaatt

SEQ ID NO: 812181 - DNA, 19 bp, Mus musculus
  siRNA target sequence for 8430403M08Rik (NM_198162.1,1422-1440).
cccagcgtggaatcatcaa

SEQ ID NO: 812182 - DNA, 19 bp, Mus musculus
  siRNA target sequence for 8430403M08Rik (NM_198162.1,1424-1442).
cagcgtggaatcatcaagt

SEQ ID NO: 812183 - DNA, 19 bp, Mus musculus
  siRNA target sequence for 8430403M08Rik (NM_198162.1,1426-1444).
gcgtggaatcatcaagttt

SEQ ID NO: 812184 - DNA, 19 bp, Mus musculus
  siRNA target sequence for 8430403M08Rik (NM_198162.1,1427-1445).
cgtggaatcatcaagtttt

SEQ ID NO: 812185 - DNA, 19 bp, Mus musculus
  siRNA target sequence for 8430403M08Rik (NM_198162.1,1477-1495).
gaaccaacctccatctagt

SEQ ID NO: 812186 - DNA, 19 bp, Mus musculus
  siRNA target sequence for 8430403M08Rik (NM_198162.1,1513-1531).
ccggagagctatggaaatt

SEQ ID NO: 812187 - DNA, 19 bp, Mus musculus
  siRNA target sequence for 8430403M08Rik (NM_198162.1,1834-1852).
cttagaagtgactacaaga

SEQ ID NO: 812188 - DNA, 19 bp, Mus musculus
  siRNA target sequence for 8430403M08Rik (NM_198162.1,1843-1861).
gactacaagacctattgaa

SEQ ID NO: 812189 - DNA, 19 bp, Mus musculus
  siRNA target sequence for 8430403M08Rik (NM_198162.1,1845-1863).
ctacaagacctattgaaga

SEQ ID NO: 812190 - DNA, 19 bp, Mus musculus
  siRNA target sequence for 8430403M08Rik (NM_198162.1,1970-1988).
ctccgaaagacgtctgtta

SEQ ID NO: 812191 - DNA, 19 bp, Mus musculus
  siRNA target sequence for 8430403M08Rik (NM_198162.1,1973-1991).
cgaaagacgtctgttatca

SEQ ID NO: 812192 - DNA, 19 bp, Mus musculus
  siRNA target sequence for 8430403M08Rik (NM_198162.1,2018-2036).
gcccgaggagaaactagta

SEQ ID NO: 812193 - DNA, 19 bp, Mus musculus
  siRNA target sequence for 8430403M08Rik (NM_198162.1,2020-2038).
ccgaggagaaactagtact

SEQ ID NO: 812194 - DNA, 19 bp, Mus musculus
  siRNA target sequence for 8430403M08Rik (NM_198162.1,2021-2039).
cgaggagaaactagtactt

SEQ ID NO: 812195 - DNA, 19 bp, Mus musculus
  siRNA target sequence for 8430403M08Rik (NM_198162.1,2024-2042).
ggagaaactagtacttcta

SEQ ID NO: 812196 - DNA, 19 bp, Mus musculus
  siRNA target sequence for 8430403M08Rik (NM_198162.1,2122-2140).
gcacacacccccactatct

SEQ ID NO: 812197 - DNA, 19 bp, Mus musculus
  siRNA target sequence for 8430403M08Rik (NM_198162.1,2123-2141).
cacacacccccactatctt

SEQ ID NO: 812198 - DNA, 19 bp, Mus musculus
  siRNA target sequence for 8430403M08Rik (NM_198162.1,2125-2143).
cacacccccactatcttta

SEQ ID NO: 812199 - DNA, 19 bp, Mus musculus
  siRNA target sequence for 8430403M08Rik (NM_198162.1,2127-2145).
cacccccactatctttaat

SEQ ID NO: 812200 - DNA, 19 bp, Mus musculus
  siRNA target sequence for 8430403M08Rik (NM_198162.1,2177-2195).
gctcaaaaagccatcaaaa

SEQ ID NO: 812201 - DNA, 19 bp, Mus musculus
  siRNA target sequence for 8430403M08Rik (NM_198162.1,2506-2524).
gaatgcggttcgatggaaa

SEQ ID NO: 812202 - DNA, 19 bp, Mus musculus
  siRNA target sequence for 8430403M08Rik (NM_198162.1,2510-2528).
gcggttcgatggaaagtga

SEQ ID NO: 812203 - DNA, 19 bp, Mus musculus
  siRNA target sequence for 8430403M08Rik (NM_198162.1,2511-2529).
cggttcgatggaaagtgaa

SEQ ID NO: 812204 - DNA, 19 bp, Mus musculus
  siRNA target sequence for 8430403M08Rik (NM_198162.1,2517-2535).
gatggaaagtgaagtttga

SEQ ID NO: 812205 - DNA, 19 bp, Mus musculus
  siRNA target sequence for 8430403M08Rik (NM_198162.1,2520-2538).
ggaaagtgaagtttgacta

SEQ ID NO: 812206 - DNA, 19 bp, Mus musculus
  siRNA target sequence for 8430403M08Rik (NM_198162.1,2521-2539).
gaaagtgaagtttgactat

SEQ ID NO: 812207 - DNA, 19 bp, Mus musculus
  siRNA target sequence for 8430403M08Rik (NM_198162.1,2578-2596).
gaaaggcagtgaagatgta

SEQ ID NO: 812208 - DNA, 19 bp, Mus musculus
  siRNA target sequence for 8430403M08Rik (NM_198162.1,2583-2601).
gcagtgaagatgtacgatt

SEQ ID NO: 812209 - DNA, 19 bp, Mus musculus
  siRNA target sequence for 8430403M08Rik (NM_198162.1,2586-2604).
gtgaagatgtacgattgat

SEQ ID NO: 812210 - DNA, 19 bp, Mus musculus
  siRNA target sequence for 8430403M08Rik (NM_198162.1,2757-2775).
ccagccatgagactattga

SEQ ID NO: 812211 - DNA, 19 bp, Mus musculus
  siRNA target sequence for 8430403M08Rik (NM_198162.1,2760-2778).
gccatgagactattgatct

SEQ ID NO: 812212 - DNA, 19 bp, Mus musculus
  siRNA target sequence for 8430403M08Rik (NM_198162.1,2782-2800).
ggtccagattcttcgaaat

SEQ ID NO: 812213 - DNA, 19 bp, Mus musculus
  siRNA target sequence for 8430403M08Rik (NM_198162.1,2783-2801).
gtccagattcttcgaaatt

SEQ ID NO: 812214 - DNA, 19 bp, Mus musculus
  siRNA target sequence for 8430403M08Rik (NM_198162.1,2848-2866).
gctgagtgttatgaattca

SEQ ID NO: 812215 - DNA, 19 bp, Mus musculus
  siRNA target sequence for 8430403M08Rik (NM_198162.1,2851-2869).
gagtgttatgaattcagaa

SEQ ID NO: 812216 - DNA, 19 bp, Mus musculus
  siRNA target sequence for 8430403M08Rik (NM_198162.1,2860-2878).
gaattcagaagaactaata

SEQ ID NO: 812217 - DNA, 19 bp, Mus musculus
  siRNA target sequence for 8430403M08Rik (NM_198162.1,3037-3055).
gttgaggaccaacattgta

SEQ ID NO: 812218 - DNA, 19 bp, Mus musculus
  siRNA target sequence for 9530019H02Rik (NM_198163.1,225-243).
gcagcttgctgttacgatt

SEQ ID NO: 812219 - DNA, 19 bp, Mus musculus
  siRNA target sequence for 9530019H02Rik (NM_198163.1,373-391).
caccatcacctctacgtat

SEQ ID NO: 812220 - DNA, 19 bp, Mus musculus
  siRNA target sequence for 9530019H02Rik (NM_198163.1,399-417).
ggacccatggggtcattgt

SEQ ID NO: 812221 - DNA, 19 bp, Mus musculus
  siRNA target sequence for 9530019H02Rik (NM_198163.1,408-426).
gggtcattgtggtttacga

SEQ ID NO: 812222 - DNA, 19 bp, Mus musculus
  siRNA target sequence for 9530019H02Rik (NM_198163.1,435-453).
gtgccgagtcctttgtcaa

SEQ ID NO: 812223 - DNA, 19 bp, Mus musculus
  siRNA target sequence for 9530019H02Rik (NM_198163.1,457-475).
caagcgatggcttcatgaa

SEQ ID NO: 812224 - DNA, 19 bp, Mus musculus
  siRNA target sequence for 9530019H02Rik (NM_198163.1,491-509).
gacgatgtgtgccgaatat

SEQ ID NO: 812225 - DNA, 19 bp, Mus musculus
  siRNA target sequence for 9530019H02Rik (NM_198163.1,493-511).
cgatgtgtgccgaatatta

SEQ ID NO: 812226 - DNA, 19 bp, Mus musculus
  siRNA target sequence for 9530019H02Rik (NM_198163.1,587-605).
gggatccagctctttgaga

SEQ ID NO: 812227 - DNA, 19 bp, Mus musculus
  siRNA target sequence for 9530019H02Rik (NM_198163.1,635-653).
gagatgttcaactgtatca

SEQ ID NO: 812228 - DNA, 19 bp, Mus musculus
  siRNA target sequence for 9530019H02Rik (NM_198163.1,665-683).
ctgcgagcaaagaaagaca

SEQ ID NO: 812229 - DNA, 19 bp, Mus musculus
  siRNA target sequence for 9530019H02Rik (NM_198163.1,727-745).
gctcaccaaaaacagtaaa

SEQ ID NO: 812230 - DNA, 19 bp, Mus musculus
  siRNA target sequence for 9530019H02Rik (NM_198163.1,730-748).
caccaaaaacagtaaacga

SEQ ID NO: 812231 - DNA, 19 bp, Mus musculus
  siRNA target sequence for 2700084L06Rik (NM_198164.1,400-418).
ggaatatgcacttaagcaa

SEQ ID NO: 812232 - DNA, 19 bp, Mus musculus
  siRNA target sequence for 2700084L06Rik (NM_198164.1,421-439).
cgaaggcacaggaatatct

SEQ ID NO: 812233 - DNA, 19 bp, Mus musculus
  siRNA target sequence for 2700084L06Rik (NM_198164.1,422-440).
gaaggcacaggaatatcta

SEQ ID NO: 812234 - DNA, 19 bp, Mus musculus
  siRNA target sequence for 2700084L06Rik (NM_198164.1,425-443).
ggcacaggaatatctatgt

SEQ ID NO: 812235 - DNA, 19 bp, Mus musculus
  siRNA target sequence for 2700084L06Rik (NM_198164.1,442-460).
gtcggcttgtagagagatt

SEQ ID NO: 812236 - DNA, 19 bp, Mus musculus
  siRNA target sequence for 2700084L06Rik (NM_198164.1,592-610).
ccgtgcatcaaaagcaaat

SEQ ID NO: 812237 - DNA, 19 bp, Mus musculus
  siRNA target sequence for 2700084L06Rik (NM_198164.1,593-611).
cgtgcatcaaaagcaaata

SEQ ID NO: 812238 - DNA, 19 bp, Mus musculus
  siRNA target sequence for 2700084L06Rik (NM_198164.1,633-651).
gatccatggttaaatcact

SEQ ID NO: 812239 - DNA, 19 bp, Mus musculus
  siRNA target sequence for 2700084L06Rik (NM_198164.1,719-737).
ccagcaaatatcctagtaa

SEQ ID NO: 812240 - DNA, 19 bp, Mus musculus
  siRNA target sequence for 2700084L06Rik (NM_198164.1,720-738).
cagcaaatatcctagtaat

SEQ ID NO: 812241 - DNA, 19 bp, Mus musculus
  siRNA target sequence for 2700084L06Rik (NM_198164.1,832-850).
ctgtcgtcaggaggatata

SEQ ID NO: 812242 - DNA, 19 bp, Mus musculus
  siRNA target sequence for 2700084L06Rik (NM_198164.1,834-852).
gtcgtcaggaggatataaa

SEQ ID NO: 812243 - DNA, 19 bp, Mus musculus
  siRNA target sequence for 2700084L06Rik (NM_198164.1,855-873).
caagcaatccttttcatca

SEQ ID NO: 812244 - DNA, 19 bp, Mus musculus
  siRNA target sequence for 2700084L06Rik (NM_198164.1,859-877).
caatccttttcatcatgat

SEQ ID NO: 812245 - DNA, 19 bp, Mus musculus
  siRNA target sequence for 2700084L06Rik (NM_198164.1,878-896).
cagttagatcgaatattta

SEQ ID NO: 812246 - DNA, 19 bp, Mus musculus
  siRNA target sequence for 2700084L06Rik (NM_198164.1,880-898).
gttagatcgaatatttagt

SEQ ID NO: 812247 - DNA, 19 bp, Mus musculus
  siRNA target sequence for 2700084L06Rik (NM_198164.1,999-1017).
gcagcctcataaaatacat

SEQ ID NO: 812248 - DNA, 19 bp, Mus musculus
  siRNA target sequence for 2700084L06Rik (NM_198164.1,1082-1100).
gatccaaccaagagaatca

SEQ ID NO: 812249 - DNA, 19 bp, Mus musculus
  siRNA target sequence for 2700084L06Rik (NM_198164.1,1141-1159).
ccccctgccaacattagat

SEQ ID NO: 812250 - DNA, 19 bp, Mus musculus
  siRNA target sequence for 2700084L06Rik (NM_198164.1,1177-1195).
gattccgtaccccaaaaga

SEQ ID NO: 812251 - DNA, 19 bp, Mus musculus
  siRNA target sequence for 2700084L06Rik (NM_198164.1,1327-1345).
gagcagtgcccaaaccaat

SEQ ID NO: 812252 - DNA, 19 bp, Mus musculus
  siRNA target sequence for 2700084L06Rik (NM_198164.1,1456-1474).
gccttccggtgcaaactca

SEQ ID NO: 812253 - DNA, 19 bp, Mus musculus
  siRNA target sequence for 2700084L06Rik (NM_198164.1,1483-1501).
cgttatgccgtcggattat

SEQ ID NO: 812254 - DNA, 19 bp, Mus musculus
  siRNA target sequence for 2700084L06Rik (NM_198164.1,1512-1530).
gttctcgcctgaattacca

SEQ ID NO: 812255 - DNA, 19 bp, Mus musculus
  siRNA target sequence for 2700084L06Rik (NM_198164.1,1567-1585).
gctaggctactcttcatct

SEQ ID NO: 812256 - DNA, 19 bp, Mus musculus
  siRNA target sequence for 6720425G15Rik (NM_198165.1,470-488).
ggagagacctgttcaacaa

SEQ ID NO: 812257 - DNA, 19 bp, Mus musculus
  siRNA target sequence for 6720425G15Rik (NM_198165.1,535-553).
cgcatcacccagtacatct

SEQ ID NO: 812258 - DNA, 19 bp, Mus musculus
  siRNA target sequence for 6720425G15Rik (NM_198165.1,650-668).
cctttgtcggggttgtgaa

SEQ ID NO: 812259 - DNA, 19 bp, Mus musculus
  siRNA target sequence for 6720425G15Rik (NM_198165.1,659-677).
gggttgtgaaggttggaat

SEQ ID NO: 812260 - DNA, 19 bp, Mus musculus
  siRNA target sequence for 6720425G15Rik (NM_198165.1,754-772).
ccaccgtctgcatctacat

SEQ ID NO: 812261 - DNA, 19 bp, Mus musculus
  siRNA target sequence for 6720425G15Rik (NM_198165.1,1208-1226).
gcagcgatgtcaagttctt

SEQ ID NO: 812262 - DNA, 19 bp, Mus musculus
  siRNA target sequence for URP (NM_198166.2,129-147).
ggtgtggactcctgacttt

SEQ ID NO: 812263 - DNA, 19 bp, Mus musculus
  siRNA target sequence for URP (NM_198166.2,140-158).
ctgactttgttgtctgtaa

SEQ ID NO: 812264 - DNA, 19 bp, Mus musculus
  siRNA target sequence for URP (NM_198166.2,211-229).
gttgtttccagctaaagaa

SEQ ID NO: 812265 - DNA, 19 bp, Mus musculus
  siRNA target sequence for URP (NM_198166.2,317-335).
cttagacaggtaaagaagt

SEQ ID NO: 812266 - DNA, 19 bp, Mus musculus
  siRNA target sequence for URP (NM_198166.2,369-387).
ggctgtccaatgctttaga

SEQ ID NO: 812267 - DNA, 19 bp, Mus musculus
  siRNA target sequence for URP (NM_198166.2,408-426).
ctaaaaaacgagcttgttt

SEQ ID NO: 812268 - DNA, 19 bp, Mus musculus
  siRNA target sequence for 6430407N22 (NM_198170.1,505-523).
catcccgcttggtgcatta

SEQ ID NO: 812269 - DNA, 19 bp, Mus musculus
  siRNA target sequence for 6430407N22 (NM_198170.1,721-739).
ccttcctgcagcaatacgt

SEQ ID NO: 812270 - DNA, 19 bp, Mus musculus
  siRNA target sequence for 6430407N22 (NM_198170.1,977-995).
ctgttacttctgtgtcaaa

SEQ ID NO: 812271 - DNA, 19 bp, Mus musculus
  siRNA target sequence for 6430407N22 (NM_198170.1,1234-1252).
cccactttggccgtaatca

SEQ ID NO: 812272 - DNA, 19 bp, Mus musculus
  siRNA target sequence for 6430407N22 (NM_198170.1,1236-1254).
cactttggccgtaatcaca

SEQ ID NO: 812273 - DNA, 19 bp, Mus musculus
  siRNA target sequence for 6430407N22 (NM_198170.1,1238-1256).
ctttggccgtaatcacatt

SEQ ID NO: 812274 - DNA, 19 bp, Mus musculus
  siRNA target sequence for 6430407N22 (NM_198170.1,1244-1262).
ccgtaatcacatttaccaa

SEQ ID NO: 812275 - DNA, 19 bp, Mus musculus
  siRNA target sequence for 6430407N22 (NM_198170.1,1369-1387).
ccggtggtccggaacataa

SEQ ID NO: 812276 - DNA, 19 bp, Mus musculus
  siRNA target sequence for 6430407N22 (NM_198170.1,1370-1388).
cggtggtccggaacataat

SEQ ID NO: 812277 - DNA, 19 bp, Mus musculus
  siRNA target sequence for 6430407N22 (NM_198170.1,1374-1392).
ggtccggaacataatgaat

SEQ ID NO: 812278 - DNA, 19 bp, Mus musculus
  siRNA target sequence for 6430407N22 (NM_198170.1,2131-2149).
cgtctctgacggtggtttt

SEQ ID NO: 812279 - DNA, 19 bp, Mus musculus
  siRNA target sequence for LOC234669 (NM_198171.1,33-51).
ccacggagccaaatgcata

SEQ ID NO: 812280 - DNA, 19 bp, Mus musculus
  siRNA target sequence for LOC234669 (NM_198171.1,34-52).
cacggagccaaatgcataa

SEQ ID NO: 812281 - DNA, 19 bp, Mus musculus
  siRNA target sequence for LOC234669 (NM_198171.1,36-54).
cggagccaaatgcataact

SEQ ID NO: 812282 - DNA, 19 bp, Mus musculus
  siRNA target sequence for BC024139 (NM_198172.1,190-208).
ggatctctctccaagatct

SEQ ID NO: 812283 - DNA, 19 bp, Mus musculus
  siRNA target sequence for BC024139 (NM_198172.1,637-655).
ggcagcacagagctttgaa

SEQ ID NO: 812284 - DNA, 19 bp, Mus musculus
  siRNA target sequence for BC024139 (NM_198172.1,638-656).
gcagcacagagctttgaaa

SEQ ID NO: 812285 - DNA, 19 bp, Mus musculus
  siRNA target sequence for BC024139 (NM_198172.1,893-911).
cgtgtcaagctgactgaat

SEQ ID NO: 812286 - DNA, 19 bp, Mus musculus
  siRNA target sequence for BC024139 (NM_198172.1,1103-1121).
cagtgggcagagacttcta

SEQ ID NO: 812287 - DNA, 19 bp, Mus musculus
  siRNA target sequence for BC024139 (NM_198172.1,1213-1231).
gttagagactcgagaacaa

SEQ ID NO: 812288 - DNA, 19 bp, Mus musculus
  siRNA target sequence for BC024139 (NM_198172.1,1259-1277).
ccagctgtgcagatctcat

SEQ ID NO: 812289 - DNA, 19 bp, Mus musculus
  siRNA target sequence for BC024139 (NM_198172.1,1324-1342).
ggactggaacccaagttta

SEQ ID NO: 812290 - DNA, 19 bp, Mus musculus
  siRNA target sequence for BC024139 (NM_198172.1,1393-1411).
gagaggagctgctgactat

SEQ ID NO: 812291 - DNA, 19 bp, Mus musculus
  siRNA target sequence for BC024139 (NM_198172.1,1741-1759).
ggggaagattccaaaagaa

SEQ ID NO: 812292 - DNA, 19 bp, Mus musculus
  siRNA target sequence for BC024139 (NM_198172.1,1934-1952).
caaggctggcctagctata

SEQ ID NO: 812293 - DNA, 19 bp, Mus musculus
  siRNA target sequence for BC024139 (NM_198172.1,2206-2224).
gggtaggacaggacatgta

SEQ ID NO: 812294 - DNA, 19 bp, Mus musculus
  siRNA target sequence for BC024139 (NM_198172.1,2207-2225).
ggtaggacaggacatgtaa

SEQ ID NO: 812295 - DNA, 19 bp, Mus musculus
  siRNA target sequence for BC024139 (NM_198172.1,2211-2229).
ggacaggacatgtaagtca

SEQ ID NO: 812296 - DNA, 19 bp, Mus musculus
  siRNA target sequence for BC024139 (NM_198172.1,2212-2230).
gacaggacatgtaagtcat

SEQ ID NO: 812297 - DNA, 19 bp, Mus musculus
  siRNA target sequence for C78212 (NM_198176.1,393-411).
cagccgctctcaagctatt

SEQ ID NO: 812298 - DNA, 19 bp, Mus musculus
  siRNA target sequence for C78212 (NM_198176.1,396-414).
ccgctctcaagctattaga

SEQ ID NO: 812299 - DNA, 19 bp, Mus musculus
  siRNA target sequence for C78212 (NM_198176.1,403-421).
caagctattagaaccttta

SEQ ID NO: 812300 - DNA, 19 bp, Mus musculus
  siRNA target sequence for C78212 (NM_198176.1,407-425).
ctattagaacctttaaagt

SEQ ID NO: 812301 - DNA, 19 bp, Mus musculus
  siRNA target sequence for C78212 (NM_198176.1,424-442).
gtacaaagcaccttgtaat

SEQ ID NO: 812302 - DNA, 19 bp, Mus musculus
  siRNA target sequence for C78212 (NM_198176.1,427-445).
caaagcaccttgtaatcct

SEQ ID NO: 812303 - DNA, 19 bp, Mus musculus
  siRNA target sequence for C78212 (NM_198176.1,509-527).
cagacgctccctgaatgta

SEQ ID NO: 812304 - DNA, 19 bp, Mus musculus
  siRNA target sequence for C78212 (NM_198176.1,511-529).
gacgctccctgaatgtaat

SEQ ID NO: 812305 - DNA, 19 bp, Mus musculus
  siRNA target sequence for C78212 (NM_198176.1,616-634).
gggtttggagttcaacaaa

SEQ ID NO: 812306 - DNA, 19 bp, Mus musculus
  siRNA target sequence for C78212 (NM_198176.1,725-743).
ggaacccgagttttcttaa

SEQ ID NO: 812307 - DNA, 19 bp, Mus musculus
  siRNA target sequence for C78212 (NM_198176.1,730-748).
ccgagttttcttaaagcta

SEQ ID NO: 812308 - DNA, 19 bp, Mus musculus
  siRNA target sequence for C78212 (NM_198176.1,731-749).
cgagttttcttaaagctaa

SEQ ID NO: 812309 - DNA, 19 bp, Mus musculus
  siRNA target sequence for C78212 (NM_198176.1,799-817).
catagctgcttcagaagtt

SEQ ID NO: 812310 - DNA, 19 bp, Mus musculus
  siRNA target sequence for C78212 (NM_198176.1,804-822).
ctgcttcagaagttgaact

SEQ ID NO: 812311 - DNA, 19 bp, Mus musculus
  siRNA target sequence for C78212 (NM_198176.1,821-839).
ctaattttgcacaaagtca

SEQ ID NO: 812312 - DNA, 19 bp, Mus musculus
  siRNA target sequence for C78212 (NM_198176.1,836-854).
gtcacattctaccaaaata

SEQ ID NO: 812313 - DNA, 19 bp, Mus musculus
  siRNA target sequence for C78212 (NM_198176.1,864-882).
cagaagtcataactaatta

SEQ ID NO: 812314 - DNA, 19 bp, Mus musculus
  siRNA target sequence for C78212 (NM_198176.1,959-977).
cagctgagtgtgaaaaaca

SEQ ID NO: 812315 - DNA, 19 bp, Mus musculus
  siRNA target sequence for C78212 (NM_198176.1,961-979).
gctgagtgtgaaaaacata

SEQ ID NO: 812316 - DNA, 19 bp, Mus musculus
  siRNA target sequence for C78212 (NM_198176.1,993-1011).
cctccgatctgatcagtat

SEQ ID NO: 812317 - DNA, 19 bp, Mus musculus
  siRNA target sequence for C78212 (NM_198176.1,1051-1069).
gtccatgctagatgtgtat

SEQ ID NO: 812318 - DNA, 19 bp, Mus musculus
  siRNA target sequence for C78212 (NM_198176.1,1118-1136).
ctcctagtagctgatcttt

SEQ ID NO: 812319 - DNA, 19 bp, Mus musculus
  siRNA target sequence for C78212 (NM_198176.1,1150-1168).
ccgcagagtgcctcgtttt

SEQ ID NO: 812320 - DNA, 19 bp, Mus musculus
  siRNA target sequence for C78212 (NM_198176.1,1151-1169).
cgcagagtgcctcgttttt

SEQ ID NO: 812321 - DNA, 19 bp, Mus musculus
  siRNA target sequence for C78212 (NM_198176.1,1199-1217).
cactggagagagctatctt

SEQ ID NO: 812322 - DNA, 19 bp, Mus musculus
  siRNA target sequence for C78212 (NM_198176.1,1219-1237).
gtctcagctgattcactta

SEQ ID NO: 812323 - DNA, 19 bp, Mus musculus
  siRNA target sequence for C78212 (NM_198176.1,1221-1239).
ctcagctgattcacttaat

SEQ ID NO: 812324 - DNA, 19 bp, Mus musculus
  siRNA target sequence for C78212 (NM_198176.1,1234-1252).
cttaatttatattataggt

SEQ ID NO: 812325 - DNA, 19 bp, Mus musculus
  siRNA target sequence for C78212 (NM_198176.1,1292-1310).
gaatcactgatccttaagt

SEQ ID NO: 812326 - DNA, 19 bp, Mus musculus
  siRNA target sequence for C78212 (NM_198176.1,1296-1314).
cactgatccttaagtatgt

SEQ ID NO: 812327 - DNA, 19 bp, Mus musculus
  siRNA target sequence for C78212 (NM_198176.1,1300-1318).
gatccttaagtatgtagat

SEQ ID NO: 812328 - DNA, 19 bp, Mus musculus
  siRNA target sequence for C78212 (NM_198176.1,1303-1321).
ccttaagtatgtagattca

SEQ ID NO: 812329 - DNA, 19 bp, Mus musculus
  siRNA target sequence for C78212 (NM_198176.1,1309-1327).
gtatgtagattcagtcaat

SEQ ID NO: 812330 - DNA, 19 bp, Mus musculus
  siRNA target sequence for C78212 (NM_198176.1,1371-1389).
gtagtagtctctctgaatt

SEQ ID NO: 812331 - DNA, 19 bp, Mus musculus
  siRNA target sequence for C78212 (NM_198176.1,1396-1414).
gcggaaaattggagatcta

SEQ ID NO: 812332 - DNA, 19 bp, Mus musculus
  siRNA target sequence for C78212 (NM_198176.1,1438-1456).
gagtagccacaccttagtt

SEQ ID NO: 812333 - DNA, 19 bp, Mus musculus
  siRNA target sequence for C78212 (NM_198176.1,1440-1458).
gtagccacaccttagttca

SEQ ID NO: 812334 - DNA, 19 bp, Mus musculus
  siRNA target sequence for C78212 (NM_198176.1,1443-1461).
gccacaccttagttcatat

SEQ ID NO: 812335 - DNA, 19 bp, Mus musculus
  siRNA target sequence for C78212 (NM_198176.1,1471-1489).
gttccgcttcactcatgta

SEQ ID NO: 812336 - DNA, 19 bp, Mus musculus
  siRNA target sequence for C78212 (NM_198176.1,1474-1492).
ccgcttcactcatgtagat

SEQ ID NO: 812337 - DNA, 19 bp, Mus musculus
  siRNA target sequence for C78212 (NM_198176.1,1490-1508).
gatcatatacattttatga

SEQ ID NO: 812338 - DNA, 19 bp, Mus musculus
  siRNA target sequence for C78212 (NM_198176.1,1551-1569).
gggttcagggtgttatgca

SEQ ID NO: 812339 - DNA, 19 bp, Mus musculus
  siRNA target sequence for C78212 (NM_198176.1,1653-1671).
cacactgtcgaagtaaaga

SEQ ID NO: 812340 - DNA, 19 bp, Mus musculus
  siRNA target sequence for C78212 (NM_198176.1,1657-1675).
ctgtcgaagtaaagatgtt

SEQ ID NO: 812341 - DNA, 19 bp, Mus musculus
  siRNA target sequence for C78212 (NM_198176.1,1716-1734).
cacccaacacagaagaatt

SEQ ID NO: 812342 - DNA, 19 bp, Mus musculus
  siRNA target sequence for C78212 (NM_198176.1,1718-1736).
cccaacacagaagaatttt

SEQ ID NO: 812343 - DNA, 19 bp, Mus musculus
  siRNA target sequence for C78212 (NM_198176.1,1811-1829).
ctgattggcttggcatttt

SEQ ID NO: 812344 - DNA, 19 bp, Mus musculus
  siRNA target sequence for C78212 (NM_198176.1,1865-1883).
ctgagcccaggatttgtca

SEQ ID NO: 812345 - DNA, 19 bp, Mus musculus
  siRNA target sequence for C78212 (NM_198176.1,1915-1933).
cactaaggaactgtttact

SEQ ID NO: 812346 - DNA, 19 bp, Mus musculus
  siRNA target sequence for C78212 (NM_198176.1,1917-1935).
ctaaggaactgtttactct

SEQ ID NO: 812347 - DNA, 19 bp, Mus musculus
  siRNA target sequence for C78212 (NM_198176.1,1950-1968).
ccattgaatgtccagatta

SEQ ID NO: 812348 - DNA, 19 bp, Mus musculus
  siRNA target sequence for C78212 (NM_198176.1,1969-1987).
caagggcaaccgtcttaat

SEQ ID NO: 812349 - DNA, 19 bp, Mus musculus
  siRNA target sequence for C78212 (NM_198176.1,1972-1990).
gggcaaccgtcttaattct

SEQ ID NO: 812350 - DNA, 19 bp, Mus musculus
  siRNA target sequence for C78212 (NM_198176.1,2023-2041).
gaatctagcaagtaaggat

SEQ ID NO: 812351 - DNA, 19 bp, Mus musculus
  siRNA target sequence for C78212 (NM_198176.1,2027-2045).
ctagcaagtaaggatatga

SEQ ID NO: 812352 - DNA, 19 bp, Mus musculus
  siRNA target sequence for C78212 (NM_198176.1,2030-2048).
gcaagtaaggatatgagat

SEQ ID NO: 812353 - DNA, 19 bp, Mus musculus
  siRNA target sequence for C78212 (NM_198176.1,2034-2052).
gtaaggatatgagatcaaa

SEQ ID NO: 812354 - DNA, 19 bp, Mus musculus
  siRNA target sequence for C78212 (NM_198176.1,2062-2080).
cctagaaactctctattta

SEQ ID NO: 812355 - DNA, 19 bp, Mus musculus
  siRNA target sequence for C78212 (NM_198176.1,2139-2157).
cccgctcttctgacttaga

SEQ ID NO: 812356 - DNA, 19 bp, Mus musculus
  siRNA target sequence for C78212 (NM_198176.1,2164-2182).
gcttgatgctaacatgaaa

SEQ ID NO: 812357 - DNA, 19 bp, Mus musculus
  siRNA target sequence for C78212 (NM_198176.1,2179-2197).
gaaaccaatgccctttaat

SEQ ID NO: 812358 - DNA, 19 bp, Mus musculus
  siRNA target sequence for C78212 (NM_198176.1,2184-2202).
caatgccctttaatagtga

SEQ ID NO: 812359 - DNA, 19 bp, Mus musculus
  siRNA target sequence for C78212 (NM_198176.1,2223-2241).
gagctcaattacggtttaa

SEQ ID NO: 812360 - DNA, 19 bp, Mus musculus
  siRNA target sequence for C78212 (NM_198176.1,2226-2244).
ctcaattacggtttaagca

SEQ ID NO: 812361 - DNA, 19 bp, Mus musculus
  siRNA target sequence for C78212 (NM_198176.1,2248-2266).
gggagtcagccttacagat

SEQ ID NO: 812362 - DNA, 19 bp, Mus musculus
  siRNA target sequence for C78212 (NM_198176.1,2252-2270).
gtcagccttacagatgatt

SEQ ID NO: 812363 - DNA, 19 bp, Mus musculus
  siRNA target sequence for C78212 (NM_198176.1,2262-2280).
cagatgatttgatgaatca

SEQ ID NO: 812364 - DNA, 19 bp, Mus musculus
  siRNA target sequence for C78212 (NM_198176.1,2305-2323).
gtatttccaggggcaaatt

SEQ ID NO: 812365 - DNA, 19 bp, Mus musculus
  siRNA target sequence for C78212 (NM_198176.1,2311-2329).
ccaggggcaaattgagtta

SEQ ID NO: 812366 - DNA, 19 bp, Mus musculus
  siRNA target sequence for C78212 (NM_198176.1,2339-2357).
cagccacccatggagttaa

SEQ ID NO: 812367 - DNA, 19 bp, Mus musculus
  siRNA target sequence for C78212 (NM_198176.1,2341-2359).
gccacccatggagttaaga

SEQ ID NO: 812368 - DNA, 19 bp, Mus musculus
  siRNA target sequence for C78212 (NM_198176.1,2342-2360).
ccacccatggagttaagaa

SEQ ID NO: 812369 - DNA, 19 bp, Mus musculus
  siRNA target sequence for C78212 (NM_198176.1,2380-2398).
ggtgaactctggttgcaat

SEQ ID NO: 812370 - DNA, 19 bp, Mus musculus
  siRNA target sequence for C78212 (NM_198176.1,2514-2532).
ccagggctctacttggatt

SEQ ID NO: 812371 - DNA, 19 bp, Mus musculus
  siRNA target sequence for C78212 (NM_198176.1,2522-2540).
ctacttggattgcacaata

SEQ ID NO: 812372 - DNA, 19 bp, Mus musculus
  siRNA target sequence for C78212 (NM_198176.1,2528-2546).
ggattgcacaatatgaaga

SEQ ID NO: 812373 - DNA, 19 bp, Mus musculus
  siRNA target sequence for C78212 (NM_198176.1,2547-2565).
ggaggcagctagttcaaat

SEQ ID NO: 812374 - DNA, 19 bp, Mus musculus
  siRNA target sequence for C78212 (NM_198176.1,2548-2566).
gaggcagctagttcaaatt

SEQ ID NO: 812375 - DNA, 19 bp, Mus musculus
  siRNA target sequence for C78212 (NM_198176.1,2567-2585).
gggtaccgtgtggtagaat

SEQ ID NO: 812376 - DNA, 19 bp, Mus musculus
  siRNA target sequence for C78212 (NM_198176.1,2568-2586).
ggtaccgtgtggtagaatt

SEQ ID NO: 812377 - DNA, 19 bp, Mus musculus
  siRNA target sequence for C78212 (NM_198176.1,2569-2587).
gtaccgtgtggtagaatta

SEQ ID NO: 812378 - DNA, 19 bp, Mus musculus
  siRNA target sequence for C78212 (NM_198176.1,2596-2614).
ggaatggcttccactacta

SEQ ID NO: 812379 - DNA, 19 bp, Mus musculus
  siRNA target sequence for C78212 (NM_198176.1,2597-2615).
gaatggcttccactactaa

SEQ ID NO: 812380 - DNA, 19 bp, Mus musculus
  siRNA target sequence for C78212 (NM_198176.1,2602-2620).
gcttccactactaaaaaga

SEQ ID NO: 812381 - DNA, 19 bp, Mus musculus
  siRNA target sequence for C78212 (NM_198176.1,2640-2658).
catacctccatgagaaagt

SEQ ID NO: 812382 - DNA, 19 bp, Mus musculus
  siRNA target sequence for Ntf5 (NM_198190.1,617-635).
cccctgcgtcagtacttct

SEQ ID NO: 812383 - DNA, 19 bp, Mus musculus
  siRNA target sequence for Ntf5 (NM_198190.1,618-636).
ccctgcgtcagtacttctt

SEQ ID NO: 812384 - DNA, 19 bp, Mus musculus
  siRNA target sequence for Gpr103 (NM_198192.1,60-78).
gactcgggaacagttcatt

SEQ ID NO: 812385 - DNA, 19 bp, Mus musculus
  siRNA target sequence for Gpr103 (NM_198192.1,62-80).
ctcgggaacagttcattca

SEQ ID NO: 812386 - DNA, 19 bp, Mus musculus
  siRNA target sequence for Gpr103 (NM_198192.1,476-494).
cccgaagggctttcacaat

SEQ ID NO: 812387 - DNA, 19 bp, Mus musculus
  siRNA target sequence for Gpr103 (NM_198192.1,547-565).
gtacaacgcctcgagatta

SEQ ID NO: 812388 - DNA, 19 bp, Mus musculus
  siRNA target sequence for Gpr103 (NM_198192.1,550-568).
caacgcctcgagattaagt

SEQ ID NO: 812389 - DNA, 19 bp, Mus musculus
  siRNA target sequence for Gpr103 (NM_198192.1,762-780).
gactatccacgggaaagaa

SEQ ID NO: 812390 - DNA, 19 bp, Mus musculus
  siRNA target sequence for Gpr103 (NM_198192.1,764-782).
ctatccacgggaaagaaat

SEQ ID NO: 812391 - DNA, 19 bp, Mus musculus
  siRNA target sequence for Gpr103 (NM_198192.1,900-918).
ctttgaaaaagagtatgat

SEQ ID NO: 812392 - DNA, 19 bp, Mus musculus
  siRNA target sequence for Gpr103 (NM_198192.1,985-1003).
ccctttgtgtatgcattta

SEQ ID NO: 812393 - DNA, 19 bp, Mus musculus
  siRNA target sequence for Gpr103 (NM_198192.1,1039-1057).
gtttgttattgcatagtaa

SEQ ID NO: 812394 - DNA, 19 bp, Mus musculus
  siRNA target sequence for Gpr103 (NM_198192.1,1111-1129).
caaaagagagcaaagttat

SEQ ID NO: 812395 - DNA, 19 bp, Mus musculus
  siRNA target sequence for Gpr103 (NM_198192.1,1175-1193).
gcgatgccaacgttgatgt

SEQ ID NO: 812396 - DNA, 19 bp, Mus musculus
  siRNA target sequence for Gpr103 (NM_198192.1,1180-1198).
gccaacgttgatgtcaaat

SEQ ID NO: 812397 - DNA, 19 bp, Mus musculus
  siRNA target sequence for Gpr103 (NM_198192.1,1181-1199).
ccaacgttgatgtcaaatt

SEQ ID NO: 812398 - DNA, 19 bp, Mus musculus
  siRNA target sequence for Gpr103 (NM_198192.1,1185-1203).
cgttgatgtcaaattgtgt

SEQ ID NO: 812399 - DNA, 19 bp, Mus musculus
  siRNA target sequence for Gpr103 (NM_198192.1,1233-1251).
gcgacagcttgccttcttt

SEQ ID NO: 812400 - DNA, 19 bp, Mus musculus
  siRNA target sequence for Gpr103 (NM_198192.1,1234-1252).
cgacagcttgccttcttta

SEQ ID NO: 812401 - DNA, 19 bp, Mus musculus
  siRNA target sequence for Gpr103 (NM_198192.1,1258-1276).
gaactttctgaaaactcta

SEQ ID NO: 812402 - DNA, 19 bp, Mus musculus
  siRNA target sequence for Raet1e (NM_198193.1,304-322).
cagtggatgaaataactat

SEQ ID NO: 812403 - DNA, 19 bp, Mus musculus
  siRNA target sequence for Raet1e (NM_198193.1,386-404).
cactggcaaatgtttgaca

SEQ ID NO: 812404 - DNA, 19 bp, Mus musculus
  siRNA target sequence for Raet1e (NM_198193.1,660-678).
gaccttgtgcaacaattga

SEQ ID NO: 812405 - DNA, 19 bp, Mus musculus
  siRNA target sequence for Raet1e (NM_198193.1,692-710).
ccaatgcagacagaaaatt

SEQ ID NO: 812406 - DNA, 19 bp, Mus musculus
  siRNA target sequence for Snph (NM_198214.1,241-259).
gtccctgcagggaagtaga

SEQ ID NO: 812407 - DNA, 19 bp, Mus musculus
  siRNA target sequence for Snph (NM_198214.1,485-503).
ccgaggcgctccatgaagt

SEQ ID NO: 812408 - DNA, 19 bp, Mus musculus
  siRNA target sequence for Snph (NM_198214.1,645-663).
cggagatcgatgaccttaa

SEQ ID NO: 812409 - DNA, 19 bp, Mus musculus
  siRNA target sequence for Snph (NM_198214.1,1042-1060).
cgaggatggagctgatagt

SEQ ID NO: 812410 - DNA, 19 bp, Mus musculus
  siRNA target sequence for Snph (NM_198214.1,1050-1068).
gagctgatagtggatatgt

SEQ ID NO: 812411 - DNA, 19 bp, Mus musculus
  siRNA target sequence for Snph (NM_198214.1,1484-1502).
cggcctgcagtcaactcta

SEQ ID NO: 812412 - DNA, 19 bp, Mus musculus
  siRNA target sequence for Snph (NM_198214.1,1485-1503).
ggcctgcagtcaactctaa

SEQ ID NO: 812413 - DNA, 19 bp, Mus musculus
  siRNA target sequence for Snph (NM_198214.1,1683-1701).
gtcagggccagcccattta

SEQ ID NO: 812414 - DNA, 19 bp, Mus musculus
  siRNA target sequence for Snph (NM_198214.1,1685-1703).
cagggccagcccatttaca

SEQ ID NO: 812415 - DNA, 19 bp, Mus musculus
  siRNA target sequence for 1700060E18Rik (NM_198224.1,290-308).
ctgttttaggggttatcca

SEQ ID NO: 812416 - DNA, 19 bp, Mus musculus
  siRNA target sequence for 1700060E18Rik (NM_198224.1,298-316).
ggggttatccagattatga

SEQ ID NO: 812417 - DNA, 19 bp, Mus musculus
  siRNA target sequence for 1700060E18Rik (NM_198224.1,299-317).
gggttatccagattatgat

SEQ ID NO: 812418 - DNA, 19 bp, Mus musculus
  siRNA target sequence for 1700060E18Rik (NM_198224.1,300-318).
ggttatccagattatgatt

SEQ ID NO: 812419 - DNA, 19 bp, Mus musculus
  siRNA target sequence for 1700060E18Rik (NM_198224.1,309-327).
gattatgattggaatctat

SEQ ID NO: 812420 - DNA, 19 bp, Mus musculus
  siRNA target sequence for 1700060E18Rik (NM_198224.1,315-333).
gattggaatctatcatgta

SEQ ID NO: 812421 - DNA, 19 bp, Mus musculus
  siRNA target sequence for 1700060E18Rik (NM_198224.1,320-338).
gaatctatcatgtactcat

SEQ ID NO: 812422 - DNA, 19 bp, Mus musculus
  siRNA target sequence for 1700060E18Rik (NM_198224.1,328-346).
catgtactcatgtggtatt

SEQ ID NO: 812423 - DNA, 19 bp, Mus musculus
  siRNA target sequence for 1700060E18Rik (NM_198224.1,334-352).
ctcatgtggtatttcctat

SEQ ID NO: 812424 - DNA, 19 bp, Mus musculus
  siRNA target sequence for 1700060E18Rik (NM_198224.1,368-386).
gacaaattaaaggagtatt

SEQ ID NO: 812425 - DNA, 19 bp, Mus musculus
  siRNA target sequence for 1700060E18Rik (NM_198224.1,464-482).
ctgtaaaagcagcaaaata

SEQ ID NO: 812426 - DNA, 19 bp, Mus musculus
  siRNA target sequence for 1700060E18Rik (NM_198224.1,493-511).
catatgattctctgtacta

SEQ ID NO: 812427 - DNA, 19 bp, Mus musculus
  siRNA target sequence for 1700060E18Rik (NM_198224.1,509-527).
ctatgtccctgaacatact

SEQ ID NO: 812428 - DNA, 19 bp, Mus musculus
  siRNA target sequence for 1700060E18Rik (NM_198224.1,517-535).
ctgaacatactctgcataa

SEQ ID NO: 812429 - DNA, 19 bp, Mus musculus
  siRNA target sequence for 1700060E18Rik (NM_198224.1,519-537).
gaacatactctgcataatt

SEQ ID NO: 812430 - DNA, 19 bp, Mus musculus
  siRNA target sequence for 1700060E18Rik (NM_198224.1,526-544).
ctctgcataattattacga

SEQ ID NO: 812431 - DNA, 19 bp, Mus musculus
  siRNA target sequence for 1700060E18Rik (NM_198224.1,547-565).
gttgcagccagcctaacaa

SEQ ID NO: 812432 - DNA, 19 bp, Mus musculus
  siRNA target sequence for 1700060E18Rik (NM_198224.1,557-575).
gcctaacaatagtggaatt

SEQ ID NO: 812433 - DNA, 19 bp, Mus musculus
  siRNA target sequence for 1700060E18Rik (NM_198224.1,559-577).
ctaacaatagtggaattgt

SEQ ID NO: 812434 - DNA, 19 bp, Mus musculus
  siRNA target sequence for 1700060E18Rik (NM_198224.1,585-603).
ccgttcggtgtcatataga

SEQ ID NO: 812435 - DNA, 19 bp, Mus musculus
  siRNA target sequence for 1700060E18Rik (NM_198224.1,586-604).
cgttcggtgtcatatagaa

SEQ ID NO: 812436 - DNA, 19 bp, Mus musculus
  siRNA target sequence for 1700060E18Rik (NM_198224.1,587-605).
gttcggtgtcatatagaaa

SEQ ID NO: 812437 - DNA, 19 bp, Mus musculus
  siRNA target sequence for 1700060E18Rik (NM_198224.1,590-608).
cggtgtcatatagaaatta

SEQ ID NO: 812438 - DNA, 19 bp, Mus musculus
  siRNA target sequence for 1700060E18Rik (NM_198224.1,591-609).
ggtgtcatatagaaattat

SEQ ID NO: 812439 - DNA, 19 bp, Mus musculus
  siRNA target sequence for 1700060E18Rik (NM_198224.1,629-647).
gggaagtgtcccgtgtttt

SEQ ID NO: 812440 - DNA, 19 bp, Mus musculus
  siRNA target sequence for 1700060E18Rik (NM_198224.1,631-649).
gaagtgtcccgtgttttgt

SEQ ID NO: 812441 - DNA, 19 bp, Mus musculus
  siRNA target sequence for 1700060E18Rik (NM_198224.1,679-697).
gccctcttgtactcaatct

SEQ ID NO: 812442 - DNA, 19 bp, Mus musculus
  siRNA target sequence for 1700060E18Rik (NM_198224.1,682-700).
ctcttgtactcaatctcta

SEQ ID NO: 812443 - DNA, 19 bp, Mus musculus
  siRNA target sequence for 1700060E18Rik (NM_198224.1,730-748).
gaaactttagaaagtgtta

SEQ ID NO: 812444 - DNA, 19 bp, Mus musculus
  siRNA target sequence for 1700060E18Rik (NM_198224.1,734-752).
ctttagaaagtgttactga

SEQ ID NO: 812445 - DNA, 19 bp, Mus musculus
  siRNA target sequence for C130018M11Rik (NM_198247.1,357-375).
gagattgccgggtaccaaa

SEQ ID NO: 812446 - DNA, 19 bp, Mus musculus
  siRNA target sequence for C130018M11Rik (NM_198247.1,363-381).
gccgggtaccaaacactat

SEQ ID NO: 812447 - DNA, 19 bp, Mus musculus
  siRNA target sequence for C130018M11Rik (NM_198247.1,485-503).
gggaattccaaatcctata

SEQ ID NO: 812448 - DNA, 19 bp, Mus musculus
  siRNA target sequence for C130018M11Rik (NM_198247.1,606-624).
gagcgagcacacatccttt

SEQ ID NO: 812449 - DNA, 19 bp, Mus musculus
  siRNA target sequence for C130018M11Rik (NM_198247.1,609-627).
cgagcacacatcctttaca

SEQ ID NO: 812450 - DNA, 19 bp, Mus musculus
  siRNA target sequence for C130018M11Rik (NM_198247.1,610-628).
gagcacacatcctttacat

SEQ ID NO: 812451 - DNA, 19 bp, Mus musculus
  siRNA target sequence for C130018M11Rik (NM_198247.1,612-630).
gcacacatcctttacatgt

SEQ ID NO: 812452 - DNA, 19 bp, Mus musculus
  siRNA target sequence for C130018M11Rik (NM_198247.1,676-694).
gaaggtctgttctgatcaa

SEQ ID NO: 812453 - DNA, 19 bp, Mus musculus
  siRNA target sequence for C130018M11Rik (NM_198247.1,709-727).
ggatccacggggagattgt

SEQ ID NO: 812454 - DNA, 19 bp, Mus musculus
  siRNA target sequence for C130018M11Rik (NM_198247.1,1089-1107).
caccatgtggactttgaca

SEQ ID NO: 812455 - DNA, 19 bp, Mus musculus
  siRNA target sequence for C130018M11Rik (NM_198247.1,1091-1109).
ccatgtggactttgacata

SEQ ID NO: 812456 - DNA, 19 bp, Mus musculus
  siRNA target sequence for C130018M11Rik (NM_198247.1,1106-1124).
cataggcagtgcacctatt

SEQ ID NO: 812457 - DNA, 19 bp, Mus musculus
  siRNA target sequence for C130018M11Rik (NM_198247.1,1110-1128).
ggcagtgcacctatttaca

SEQ ID NO: 812458 - DNA, 19 bp, Mus musculus
  siRNA target sequence for C130018M11Rik (NM_198247.1,1111-1129).
gcagtgcacctatttacaa

SEQ ID NO: 812459 - DNA, 19 bp, Mus musculus
  siRNA target sequence for C130018M11Rik (NM_198247.1,1143-1161).
gccagcgaaatctttgtca

SEQ ID NO: 812460 - DNA, 19 bp, Mus musculus
  siRNA target sequence for C130018M11Rik (NM_198247.1,1147-1165).
gcgaaatctttgtcactaa

SEQ ID NO: 812461 - DNA, 19 bp, Mus musculus
  siRNA target sequence for C130018M11Rik (NM_198247.1,1174-1192).
cgcttggtgtccaggaaaa

SEQ ID NO: 812462 - DNA, 19 bp, Mus musculus
  siRNA target sequence for C130018M11Rik (NM_198247.1,1193-1211).
ggtcaaattcaacaatgat

SEQ ID NO: 812463 - DNA, 19 bp, Mus musculus
  siRNA target sequence for C130018M11Rik (NM_198247.1,1268-1286).
ggggaacgaccttgatttt

SEQ ID NO: 812464 - DNA, 19 bp, Mus musculus
  siRNA target sequence for C130018M11Rik (NM_198247.1,1291-1309).
gcaaaggccaattttacga

SEQ ID NO: 812465 - DNA, 19 bp, Mus musculus
  siRNA target sequence for C130018M11Rik (NM_198247.1,1292-1310).
caaaggccaattttacgat

SEQ ID NO: 812466 - DNA, 19 bp, Mus musculus
  siRNA target sequence for C130018M11Rik (NM_198247.1,1296-1314).
ggccaattttacgattatt

SEQ ID NO: 812467 - DNA, 19 bp, Mus musculus
  siRNA target sequence for C130018M11Rik (NM_198247.1,1297-1315).
gccaattttacgattattt

SEQ ID NO: 812468 - DNA, 19 bp, Mus musculus
  siRNA target sequence for C130018M11Rik (NM_198247.1,1298-1316).
ccaattttacgattatttt

SEQ ID NO: 812469 - DNA, 19 bp, Mus musculus
  siRNA target sequence for C130018M11Rik (NM_198247.1,1317-1335).
gagactggatataatgaga

SEQ ID NO: 812470 - DNA, 19 bp, Mus musculus
  siRNA target sequence for BC059177 (NM_198248.1,183-201).
ccgtcggcaacatctactt

SEQ ID NO: 812471 - DNA, 19 bp, Mus musculus
  siRNA target sequence for BC059177 (NM_198248.1,185-203).
gtcggcaacatctacttca

SEQ ID NO: 812472 - DNA, 19 bp, Mus musculus
  siRNA target sequence for BC059177 (NM_198248.1,313-331).
cctcttgctagaaatgaca

SEQ ID NO: 812473 - DNA, 19 bp, Mus musculus
  siRNA target sequence for BC059177 (NM_198248.1,314-332).
ctcttgctagaaatgacat

SEQ ID NO: 812474 - DNA, 19 bp, Mus musculus
  siRNA target sequence for BC059177 (NM_198248.1,328-346).
gacatacaccggtaagcta

SEQ ID NO: 812475 - DNA, 19 bp, Mus musculus
  siRNA target sequence for BC059177 (NM_198248.1,407-425).
gacgtggccgttagttgta

SEQ ID NO: 812476 - DNA, 19 bp, Mus musculus
  siRNA target sequence for BC059177 (NM_198248.1,409-427).
cgtggccgttagttgtaaa

SEQ ID NO: 812477 - DNA, 19 bp, Mus musculus
  siRNA target sequence for BC059177 (NM_198248.1,410-428).
gtggccgttagttgtaaaa

SEQ ID NO: 812478 - DNA, 19 bp, Mus musculus
  siRNA target sequence for BC059177 (NM_198248.1,414-432).
ccgttagttgtaaaaacct

SEQ ID NO: 812479 - DNA, 19 bp, Mus musculus
  siRNA target sequence for BC059177 (NM_198248.1,415-433).
cgttagttgtaaaaacctt

SEQ ID NO: 812480 - DNA, 19 bp, Mus musculus
  siRNA target sequence for BC059177 (NM_198248.1,557-575).
gctgaggagccctcttctt

SEQ ID NO: 812481 - DNA, 19 bp, Mus musculus
  siRNA target sequence for BC059177 (NM_198248.1,615-633).
ccaagacccaggacgtaat

SEQ ID NO: 812482 - DNA, 19 bp, Mus musculus
  siRNA target sequence for BC059177 (NM_198248.1,621-639).
cccaggacgtaatcaacat

SEQ ID NO: 812483 - DNA, 19 bp, Mus musculus
  siRNA target sequence for BC059177 (NM_198248.1,626-644).
gacgtaatcaacatagcta

SEQ ID NO: 812484 - DNA, 19 bp, Mus musculus
  siRNA target sequence for BC059177 (NM_198248.1,637-655).
catagctacccaagagata

SEQ ID NO: 812485 - DNA, 19 bp, Mus musculus
  siRNA target sequence for BC059177 (NM_198248.1,762-780).
caagtgagacgaaagaagt

SEQ ID NO: 812486 - DNA, 19 bp, Mus musculus
  siRNA target sequence for BC059177 (NM_198248.1,765-783).
gtgagacgaaagaagtcaa

SEQ ID NO: 812487 - DNA, 19 bp, Mus musculus
  siRNA target sequence for BC059177 (NM_198248.1,767-785).
gagacgaaagaagtcaata

SEQ ID NO: 812488 - DNA, 19 bp, Mus musculus
  siRNA target sequence for BC059177 (NM_198248.1,769-787).
gacgaaagaagtcaataca

SEQ ID NO: 812489 - DNA, 19 bp, Mus musculus
  siRNA target sequence for BC059177 (NM_198248.1,824-842).
ctcctgctagagcatgaaa

SEQ ID NO: 812490 - DNA, 19 bp, Mus musculus
  siRNA target sequence for BC059177 (NM_198248.1,918-936).
ctcagaaggagaccataat

SEQ ID NO: 812491 - DNA, 19 bp, Mus musculus
  siRNA target sequence for BC059177 (NM_198248.1,1066-1084).
gaaagtgtctcagattcaa

SEQ ID NO: 812492 - DNA, 19 bp, Mus musculus
  siRNA target sequence for BC059177 (NM_198248.1,1145-1163).
gacctgatccagtgtgtaa

SEQ ID NO: 812493 - DNA, 19 bp, Mus musculus
  siRNA target sequence for BC059177 (NM_198248.1,1213-1231).
cctgccagattccgaaaaa

SEQ ID NO: 812494 - DNA, 19 bp, Mus musculus
  siRNA target sequence for BC059177 (NM_198248.1,1214-1232).
ctgccagattccgaaaaaa

SEQ ID NO: 812495 - DNA, 19 bp, Mus musculus
  siRNA target sequence for BC059177 (NM_198248.1,1224-1242).
ccgaaaaaagggtgattca

SEQ ID NO: 812496 - DNA, 19 bp, Mus musculus
  siRNA target sequence for BC059177 (NM_198248.1,1376-1394).
gacctcctgctggacaatt

SEQ ID NO: 812497 - DNA, 19 bp, Mus musculus
  siRNA target sequence for BC059177 (NM_198248.1,1533-1551).
gagctgagctgttgagaaa

SEQ ID NO: 812498 - DNA, 19 bp, Mus musculus
  siRNA target sequence for BC059177 (NM_198248.1,1569-1587).
ctgagattctcatagacaa

SEQ ID NO: 812499 - DNA, 19 bp, Mus musculus
  siRNA target sequence for BC059177 (NM_198248.1,1609-1627).
ctcacggatgcaaagctta

SEQ ID NO: 812500 - DNA, 19 bp, Mus musculus
  siRNA target sequence for BC059177 (NM_198248.1,1737-1755).
cggccatttggcaactact

SEQ ID NO: 812501 - DNA, 19 bp, Mus musculus
  siRNA target sequence for BC059177 (NM_198248.1,1965-1983).
cagagaccgtgcaagagat

SEQ ID NO: 812502 - DNA, 19 bp, Mus musculus
  siRNA target sequence for BC059177 (NM_198248.1,1979-1997).
gagatgctgagcatatcct

SEQ ID NO: 812503 - DNA, 19 bp, Mus musculus
  siRNA target sequence for BC059177 (NM_198248.1,2091-2109).
gcagtgtccacaagtcttt

SEQ ID NO: 812504 - DNA, 19 bp, Mus musculus
  siRNA target sequence for BC059177 (NM_198248.1,2141-2159).
gcacatgttggtttcctta

SEQ ID NO: 812505 - DNA, 19 bp, Mus musculus
  siRNA target sequence for BC059177 (NM_198248.1,2150-2168).
ggtttccttaccaaggaaa

SEQ ID NO: 812506 - DNA, 19 bp, Mus musculus
  siRNA target sequence for BC059177 (NM_198248.1,2306-2324).
gagcaaccggagaaagaca

SEQ ID NO: 812507 - DNA, 19 bp, Mus musculus
  siRNA target sequence for BC059177 (NM_198248.1,2360-2378).
gtctgcaaagcctgtgata

SEQ ID NO: 812508 - DNA, 19 bp, Mus musculus
  siRNA target sequence for BC059177 (NM_198248.1,2581-2599).
cctctgcggaagagagttt

SEQ ID NO: 812509 - DNA, 19 bp, Mus musculus
  siRNA target sequence for BC059177 (NM_198248.1,2639-2657).
cacttcgacgagaaacctt

SEQ ID NO: 812510 - DNA, 19 bp, Mus musculus
  siRNA target sequence for BC059177 (NM_198248.1,2789-2807).
gcttaccacaccaagaaga

SEQ ID NO: 812511 - DNA, 19 bp, Mus musculus
  siRNA target sequence for BC059177 (NM_198248.1,2810-2828).
cactcggaagggaaaatgt

SEQ ID NO: 812512 - DNA, 19 bp, Mus musculus
  siRNA target sequence for BC059177 (NM_198248.1,3095-3113).
cccacgtgcggcaagatct

SEQ ID NO: 812513 - DNA, 19 bp, Mus musculus
  siRNA target sequence for BC059177 (NM_198248.1,3096-3114).
ccacgtgcggcaagatctt

SEQ ID NO: 812514 - DNA, 19 bp, Mus musculus
  siRNA target sequence for BC059177 (NM_198248.1,3234-3252).
cgcaccacccagatgtgtt

SEQ ID NO: 812515 - DNA, 19 bp, Mus musculus
  siRNA target sequence for BC059177 (NM_198248.1,3235-3253).
gcaccacccagatgtgttt

SEQ ID NO: 812516 - DNA, 19 bp, Mus musculus
  siRNA target sequence for BC059177 (NM_198248.1,3266-3284).
catcggtcacccaagttct

SEQ ID NO: 812517 - DNA, 19 bp, Mus musculus
  siRNA target sequence for BC059177 (NM_198248.1,3306-3324).
gtgacaagaccttttccaa

SEQ ID NO: 812518 - DNA, 19 bp, Mus musculus
  siRNA target sequence for BC059177 (NM_198248.1,3321-3339).
ccaatactgtcgaacacaa

SEQ ID NO: 812519 - DNA, 19 bp, Mus musculus
  siRNA target sequence for E130112L23 (NM_198249.1,1163-1181).
cgaagaaccggcaaaggaa

SEQ ID NO: 812520 - DNA, 19 bp, Mus musculus
  siRNA target sequence for E130112L23 (NM_198249.1,1323-1341).
cagaatgcagcctggttaa

SEQ ID NO: 812521 - DNA, 19 bp, Mus musculus
  siRNA target sequence for E130112L23 (NM_198249.1,1547-1565).
gagactgtgcagaatgtta

SEQ ID NO: 812522 - DNA, 19 bp, Mus musculus
  siRNA target sequence for E130112L23 (NM_198249.1,1549-1567).
gactgtgcagaatgttaaa

SEQ ID NO: 812523 - DNA, 19 bp, Mus musculus
  siRNA target sequence for E130112L23 (NM_198249.1,2516-2534).
cttcgattcagggctttta

SEQ ID NO: 812524 - DNA, 19 bp, Mus musculus
  siRNA target sequence for E130112L23 (NM_198249.1,2519-2537).
cgattcagggcttttagca

SEQ ID NO: 812525 - DNA, 19 bp, Mus musculus
  siRNA target sequence for E130112L23 (NM_198249.1,2799-2817).
caggcaccttccaagagat

SEQ ID NO: 812526 - DNA, 19 bp, Mus musculus
  siRNA target sequence for E130112L23 (NM_198249.1,3053-3071).
cgggcagccccatcacatt

SEQ ID NO: 812527 - DNA, 19 bp, Mus musculus
  siRNA target sequence for E130112L23 (NM_198249.1,3081-3099).
ccccatgtggggaggatta

SEQ ID NO: 812528 - DNA, 19 bp, Mus musculus
  siRNA target sequence for E130112L23 (NM_198249.1,3082-3100).
cccatgtggggaggattat

SEQ ID NO: 812529 - DNA, 19 bp, Mus musculus
  siRNA target sequence for E130112L23 (NM_198249.1,3084-3102).
catgtggggaggattatga

SEQ ID NO: 812530 - DNA, 19 bp, Mus musculus
  siRNA target sequence for E130112L23 (NM_198249.1,3144-3162).
ccccaagggctgtgctaat

SEQ ID NO: 812531 - DNA, 19 bp, Mus musculus
  siRNA target sequence for E130112L23 (NM_198249.1,3213-3231).
cccgagaacacgtactatt

SEQ ID NO: 812532 - DNA, 19 bp, Mus musculus
  siRNA target sequence for E130112L23 (NM_198249.1,3278-3296).
cgaatggaacgcaaacgaa

SEQ ID NO: 812533 - DNA, 19 bp, Mus musculus
  siRNA target sequence for E130112L23 (NM_198249.1,3534-3552).
gccatggggatcagttcaa

SEQ ID NO: 812534 - DNA, 19 bp, Mus musculus
  siRNA target sequence for E130112L23 (NM_198249.1,3871-3889).
gcatcgggaccctttcact

SEQ ID NO: 812535 - DNA, 19 bp, Mus musculus
  siRNA target sequence for E130112L23 (NM_198249.1,3935-3953).
gaggacctgctcttattca

SEQ ID NO: 812536 - DNA, 19 bp, Mus musculus
  siRNA target sequence for E130112L23 (NM_198249.1,3977-3995).
ggatccgagaccttcgttt

SEQ ID NO: 812537 - DNA, 19 bp, Mus musculus
  siRNA target sequence for E130112L23 (NM_198249.1,3978-3996).
gatccgagaccttcgttta

SEQ ID NO: 812538 - DNA, 19 bp, Mus musculus
  siRNA target sequence for E130112L23 (NM_198249.1,4052-4070).
ggactctgtttcgaactat

SEQ ID NO: 812539 - DNA, 19 bp, Mus musculus
  siRNA target sequence for E130112L23 (NM_198249.1,4057-4075).
ctgtttcgaactatggttt

SEQ ID NO: 812540 - DNA, 19 bp, Mus musculus
  siRNA target sequence for E130112L23 (NM_198249.1,4083-4101).
ggcgtgcaagagaagcata

SEQ ID NO: 812541 - DNA, 19 bp, Mus musculus
  siRNA target sequence for E130112L23 (NM_198249.1,4196-4214).
cgagtgcagcagatggttt

SEQ ID NO: 812542 - DNA, 19 bp, Mus musculus
  siRNA target sequence for E130112L23 (NM_198249.1,4215-4233).
ccatgggcattgggaataa

SEQ ID NO: 812543 - DNA, 19 bp, Mus musculus
  siRNA target sequence for E130112L23 (NM_198249.1,4216-4234).
catgggcattgggaataaa

SEQ ID NO: 812544 - DNA, 19 bp, Mus musculus
  siRNA target sequence for E130112L23 (NM_198249.1,4219-4237).
gggcattgggaataaacct

SEQ ID NO: 812545 - DNA, 19 bp, Mus musculus
  siRNA target sequence for E130112L23 (NM_198249.1,4415-4433).
ctctctcggcagagtcatt

SEQ ID NO: 812546 - DNA, 19 bp, Mus musculus
  siRNA target sequence for A830007M12 (NM_198250.1,534-552).
cccacgcaggcctttgagt

SEQ ID NO: 812547 - DNA, 19 bp, Mus musculus
  siRNA target sequence for A830007M12 (NM_198250.1,535-553).
ccacgcaggcctttgagta

SEQ ID NO: 812548 - DNA, 19 bp, Mus musculus
  siRNA target sequence for A830007M12 (NM_198250.1,582-600).
cgcaacaaccccatcgaaa

SEQ ID NO: 812549 - DNA, 19 bp, Mus musculus
  siRNA target sequence for A830007M12 (NM_198250.1,665-683).
gaggctggagtacatatct

SEQ ID NO: 812550 - DNA, 19 bp, Mus musculus
  siRNA target sequence for A830007M12 (NM_198250.1,799-817).
ggaaccggctggacctaat

SEQ ID NO: 812551 - DNA, 19 bp, Mus musculus
  siRNA target sequence for A830007M12 (NM_198250.1,800-818).
gaaccggctggacctaatt

SEQ ID NO: 812552 - DNA, 19 bp, Mus musculus
  siRNA target sequence for A830007M12 (NM_198250.1,960-978).
ctgccgcacgaccttttca

SEQ ID NO: 812553 - DNA, 19 bp, Mus musculus
  siRNA target sequence for A830007M12 (NM_198250.1,1295-1313).
catgacgcacggttcctat

SEQ ID NO: 812554 - DNA, 19 bp, Mus musculus
  siRNA target sequence for A830007M12 (NM_198250.1,1310-1328).
ctatcgtgtgcgcatttca

SEQ ID NO: 812555 - DNA, 19 bp, Mus musculus
  siRNA target sequence for A830007M12 (NM_198250.1,1426-1444).
cctcggccacgcttaacgt

SEQ ID NO: 812556 - DNA, 19 bp, Mus musculus
  siRNA target sequence for A830007M12 (NM_198250.1,1756-1774).
cggagaatgcgcttaagga

SEQ ID NO: 812557 - DNA, 19 bp, Mus musculus
  siRNA target sequence for A830007M12 (NM_198250.1,1909-1927).
cgcgcactgtggagatcat

SEQ ID NO: 812558 - DNA, 19 bp, Mus musculus
  siRNA target sequence for Rnf133 (NM_198251.1,256-274).
cctcttcagaccagtactt

SEQ ID NO: 812559 - DNA, 19 bp, Mus musculus
  siRNA target sequence for Rnf133 (NM_198251.1,321-339).
ctggctcgtcagtcagaaa

SEQ ID NO: 812560 - DNA, 19 bp, Mus musculus
  siRNA target sequence for Rnf133 (NM_198251.1,324-342).
gctcgtcagtcagaaatgt

SEQ ID NO: 812561 - DNA, 19 bp, Mus musculus
  siRNA target sequence for Rnf133 (NM_198251.1,325-343).
ctcgtcagtcagaaatgtt

SEQ ID NO: 812562 - DNA, 19 bp, Mus musculus
  siRNA target sequence for Rnf133 (NM_198251.1,328-346).
gtcagtcagaaatgttgta

SEQ ID NO: 812563 - DNA, 19 bp, Mus musculus
  siRNA target sequence for Rnf133 (NM_198251.1,330-348).
cagtcagaaatgttgtaca

SEQ ID NO: 812564 - DNA, 19 bp, Mus musculus
  siRNA target sequence for Rnf133 (NM_198251.1,358-376).
gtttggactgcgtacatga

SEQ ID NO: 812565 - DNA, 19 bp, Mus musculus
  siRNA target sequence for Rnf133 (NM_198251.1,363-381).
gactgcgtacatgaacata

SEQ ID NO: 812566 - DNA, 19 bp, Mus musculus
  siRNA target sequence for Rnf133 (NM_198251.1,367-385).
gcgtacatgaacatatcat

SEQ ID NO: 812567 - DNA, 19 bp, Mus musculus
  siRNA target sequence for Rnf133 (NM_198251.1,368-386).
cgtacatgaacatatcatt

SEQ ID NO: 812568 - DNA, 19 bp, Mus musculus
  siRNA target sequence for Rnf133 (NM_198251.1,477-495).
gccaccagagggaaaaatt

SEQ ID NO: 812569 - DNA, 19 bp, Mus musculus
  siRNA target sequence for Rnf133 (NM_198251.1,479-497).
caccagagggaaaaattca

SEQ ID NO: 812570 - DNA, 19 bp, Mus musculus
  siRNA target sequence for Rnf133 (NM_198251.1,512-530).
ccaataccacttttatcct

SEQ ID NO: 812571 - DNA, 19 bp, Mus musculus
  siRNA target sequence for Rnf133 (NM_198251.1,546-564).
gccctggatcgcactcatt

SEQ ID NO: 812572 - DNA, 19 bp, Mus musculus
  siRNA target sequence for Rnf133 (NM_198251.1,548-566).
cctggatcgcactcattga

SEQ ID NO: 812573 - DNA, 19 bp, Mus musculus
  siRNA target sequence for Rnf133 (NM_198251.1,549-567).
ctggatcgcactcattgaa

SEQ ID NO: 812574 - DNA, 19 bp, Mus musculus
  siRNA target sequence for Rnf133 (NM_198251.1,617-635).
gagccagaggagtgatcat

SEQ ID NO: 812575 - DNA, 19 bp, Mus musculus
  siRNA target sequence for Rnf133 (NM_198251.1,621-639).
cagaggagtgatcatctat

SEQ ID NO: 812576 - DNA, 19 bp, Mus musculus
  siRNA target sequence for Rnf133 (NM_198251.1,626-644).
gagtgatcatctataattt

SEQ ID NO: 812577 - DNA, 19 bp, Mus musculus
  siRNA target sequence for Rnf133 (NM_198251.1,675-693).
gtctcaccaggcgtttgaa

SEQ ID NO: 812578 - DNA, 19 bp, Mus musculus
  siRNA target sequence for Rnf133 (NM_198251.1,691-709).
gaagacatcgttgtagtta

SEQ ID NO: 812579 - DNA, 19 bp, Mus musculus
  siRNA target sequence for Rnf133 (NM_198251.1,694-712).
gacatcgttgtagttatga

SEQ ID NO: 812580 - DNA, 19 bp, Mus musculus
  siRNA target sequence for Rnf133 (NM_198251.1,696-714).
catcgttgtagttatgatt

SEQ ID NO: 812581 - DNA, 19 bp, Mus musculus
  siRNA target sequence for Rnf133 (NM_198251.1,700-718).
gttgtagttatgattggta

SEQ ID NO: 812582 - DNA, 19 bp, Mus musculus
  siRNA target sequence for Rnf133 (NM_198251.1,706-724).
gttatgattggtaacatca

SEQ ID NO: 812583 - DNA, 19 bp, Mus musculus
  siRNA target sequence for Rnf133 (NM_198251.1,828-846).
gctgcaagttcgagtatta

SEQ ID NO: 812584 - DNA, 19 bp, Mus musculus
  siRNA target sequence for Rnf133 (NM_198251.1,829-847).
ctgcaagttcgagtattaa

SEQ ID NO: 812585 - DNA, 19 bp, Mus musculus
  siRNA target sequence for Rnf133 (NM_198251.1,831-849).
gcaagttcgagtattaaaa

SEQ ID NO: 812586 - DNA, 19 bp, Mus musculus
  siRNA target sequence for Rnf133 (NM_198251.1,919-937).
gaaatagttcggattctca

SEQ ID NO: 812587 - DNA, 19 bp, Mus musculus
  siRNA target sequence for Rnf133 (NM_198251.1,1071-1089).
gcaagttctgatgtcaaat

SEQ ID NO: 812588 - DNA, 19 bp, Mus musculus
  siRNA target sequence for Rnf133 (NM_198251.1,1141-1159).
cctcctgcaagaacttcaa

SEQ ID NO: 812589 - DNA, 19 bp, Mus musculus
  siRNA target sequence for Rnf133 (NM_198251.1,1145-1163).
ctgcaagaacttcaagtaa

SEQ ID NO: 812590 - DNA, 19 bp, Mus musculus
  siRNA target sequence for Rnf133 (NM_198251.1,1176-1194).
gcaggagcaccctacttct

SEQ ID NO: 812591 - DNA, 19 bp, Mus musculus
  siRNA target sequence for Rnf133 (NM_198251.1,1177-1195).
caggagcaccctacttctt

SEQ ID NO: 812592 - DNA, 19 bp, Mus musculus
  siRNA target sequence for Rnf133 (NM_198251.1,1179-1197).
ggagcaccctacttcttct

SEQ ID NO: 812593 - DNA, 19 bp, Mus musculus
  siRNA target sequence for 4921518A06Rik (NM_198293.1,377-395).
gatgtcatcgctatttgct

SEQ ID NO: 812594 - DNA, 19 bp, Mus musculus
  siRNA target sequence for 4921518A06Rik (NM_198293.1,393-411).
gctgtccaaagtacaaaga

SEQ ID NO: 812595 - DNA, 19 bp, Mus musculus
  siRNA target sequence for 4921518A06Rik (NM_198293.1,532-550).
gccttgggtagacactatt

SEQ ID NO: 812596 - DNA, 19 bp, Mus musculus
  siRNA target sequence for 4921518A06Rik (NM_198293.1,533-551).
ccttgggtagacactatta

SEQ ID NO: 812597 - DNA, 19 bp, Mus musculus
  siRNA target sequence for 4921518A06Rik (NM_198293.1,581-599).
gctctaacgagtgctaata

SEQ ID NO: 812598 - DNA, 19 bp, Mus musculus
  siRNA target sequence for 4921518A06Rik (NM_198293.1,582-600).
ctctaacgagtgctaataa

SEQ ID NO: 812599 - DNA, 19 bp, Mus musculus
  siRNA target sequence for 4921518A06Rik (NM_198293.1,593-611).
gctaataagctgactaata

SEQ ID NO: 812600 - DNA, 19 bp, Mus musculus
  siRNA target sequence for 4921518A06Rik (NM_198293.1,601-619).
gctgactaataaagttgtt

SEQ ID NO: 812601 - DNA, 19 bp, Mus musculus
  siRNA target sequence for A730024F05Rik (NM_198295.1,437-455).
ccagattaaagtcaattat

SEQ ID NO: 812602 - DNA, 19 bp, Mus musculus
  siRNA target sequence for A730024F05Rik (NM_198295.1,479-497).
gagaccacttccatagaga

SEQ ID NO: 812603 - DNA, 19 bp, Mus musculus
  siRNA target sequence for A730024F05Rik (NM_198295.1,483-501).
ccacttccatagagatttt

SEQ ID NO: 812604 - DNA, 19 bp, Mus musculus
  siRNA target sequence for A730024F05Rik (NM_198295.1,489-507).
ccatagagattttcagttt

SEQ ID NO: 812605 - DNA, 19 bp, Mus musculus
  siRNA target sequence for A730024F05Rik (NM_198295.1,539-557).
ctttgttgatggacgaatt

SEQ ID NO: 812606 - DNA, 19 bp, Mus musculus
  siRNA target sequence for A730024F05Rik (NM_198295.1,543-561).
gttgatggacgaattaaca

SEQ ID NO: 812607 - DNA, 19 bp, Mus musculus
  siRNA target sequence for A730024F05Rik (NM_198295.1,560-578).
cagtcccaacaatagttgt

SEQ ID NO: 812608 - DNA, 19 bp, Mus musculus
  siRNA target sequence for A730024F05Rik (NM_198295.1,566-584).
caacaatagttgtactgaa

SEQ ID NO: 812609 - DNA, 19 bp, Mus musculus
  siRNA target sequence for A730024F05Rik (NM_198295.1,645-663).
ccagttcattaatagcatt

SEQ ID NO: 812610 - DNA, 19 bp, Mus musculus
  siRNA target sequence for A730024F05Rik (NM_198295.1,646-664).
cagttcattaatagcattt

SEQ ID NO: 812611 - DNA, 19 bp, Mus musculus
  siRNA target sequence for A730024F05Rik (NM_198295.1,683-701).
cccaaggaggtgatagcat

SEQ ID NO: 812612 - DNA, 19 bp, Mus musculus
  siRNA target sequence for A730024F05Rik (NM_198295.1,684-702).
ccaaggaggtgatagcatt

SEQ ID NO: 812613 - DNA, 19 bp, Mus musculus
  siRNA target sequence for A730024F05Rik (NM_198295.1,685-703).
caaggaggtgatagcattt

SEQ ID NO: 812614 - DNA, 19 bp, Mus musculus
  siRNA target sequence for A730024F05Rik (NM_198295.1,689-707).
gaggtgatagcatttttca

SEQ ID NO: 812615 - DNA, 19 bp, Mus musculus
  siRNA target sequence for A730024F05Rik (NM_198295.1,733-751).
gccaaatctacaattgtgt

SEQ ID NO: 812616 - DNA, 19 bp, Mus musculus
  siRNA target sequence for A730024F05Rik (NM_198295.1,815-833).
gtatcatgtgctatggaat

SEQ ID NO: 812617 - DNA, 19 bp, Mus musculus
  siRNA target sequence for A730024F05Rik (NM_198295.1,822-840).
gtgctatggaatctataca

SEQ ID NO: 812618 - DNA, 19 bp, Mus musculus
  siRNA target sequence for A730024F05Rik (NM_198295.1,846-864).
cacagatggaggctatata

SEQ ID NO: 812619 - DNA, 19 bp, Mus musculus
  siRNA target sequence for A730024F05Rik (NM_198295.1,848-866).
cagatggaggctatataga

SEQ ID NO: 812620 - DNA, 19 bp, Mus musculus
  siRNA target sequence for A730024F05Rik (NM_198295.1,868-886).
gaacgatatgaagtatcta

SEQ ID NO: 812621 - DNA, 19 bp, Mus musculus
  siRNA target sequence for A730024F05Rik (NM_198295.1,871-889).
cgatatgaagtatctaaaa

SEQ ID NO: 812622 - DNA, 19 bp, Mus musculus
  siRNA target sequence for A730024F05Rik (NM_198295.1,982-1000).
gatgtattagaaaagaaga

SEQ ID NO: 812623 - DNA, 19 bp, Mus musculus
  siRNA target sequence for 9130011E15Rik (NM_198296.1,110-128).
cctaatggtggagttcatt

SEQ ID NO: 812624 - DNA, 19 bp, Mus musculus
  siRNA target sequence for 9130011E15Rik (NM_198296.1,116-134).
ggtggagttcattgtaaca

SEQ ID NO: 812625 - DNA, 19 bp, Mus musculus
  siRNA target sequence for 9130011E15Rik (NM_198296.1,175-193).
gtgtccaggtagtgcataa

SEQ ID NO: 812626 - DNA, 19 bp, Mus musculus
  siRNA target sequence for 9130011E15Rik (NM_198296.1,206-224).
ccagaagaagtgtagagtt

SEQ ID NO: 812627 - DNA, 19 bp, Mus musculus
  siRNA target sequence for 9130011E15Rik (NM_198296.1,217-235).
gtagagttcgcctgcatta

SEQ ID NO: 812628 - DNA, 19 bp, Mus musculus
  siRNA target sequence for 9130011E15Rik (NM_198296.1,253-271).
ggtcagccttgataaactt

SEQ ID NO: 812629 - DNA, 19 bp, Mus musculus
  siRNA target sequence for 9130011E15Rik (NM_198296.1,287-305).
gtcaaatgaaactgtactt

SEQ ID NO: 812630 - DNA, 19 bp, Mus musculus
  siRNA target sequence for 9130011E15Rik (NM_198296.1,308-326).
ggccaagcacaacattttt

SEQ ID NO: 812631 - DNA, 19 bp, Mus musculus
  siRNA target sequence for 9130011E15Rik (NM_198296.1,309-327).
gccaagcacaacattttta

SEQ ID NO: 812632 - DNA, 19 bp, Mus musculus
  siRNA target sequence for 9130011E15Rik (NM_198296.1,328-346).
cattggcccttatgattgt

SEQ ID NO: 812633 - DNA, 19 bp, Mus musculus
  siRNA target sequence for 9130011E15Rik (NM_198296.1,336-354).
cttatgattgtgaacctat

SEQ ID NO: 812634 - DNA, 19 bp, Mus musculus
  siRNA target sequence for 9130011E15Rik (NM_198296.1,345-363).
gtgaacctatttaacatgt

SEQ ID NO: 812635 - DNA, 19 bp, Mus musculus
  siRNA target sequence for 9130011E15Rik (NM_198296.1,527-545).
cgcactggtgaatatcaga

SEQ ID NO: 812636 - DNA, 19 bp, Mus musculus
  siRNA target sequence for 9130011E15Rik (NM_198296.1,544-562).
gagccatcatcaatcactt

SEQ ID NO: 812637 - DNA, 19 bp, Mus musculus
  siRNA target sequence for 9130011E15Rik (NM_198296.1,580-598).
cctatgctgctgtgaatca

SEQ ID NO: 812638 - DNA, 19 bp, Mus musculus
  siRNA target sequence for 9130011E15Rik (NM_198296.1,617-635).
ggaacaggtactagaagta

SEQ ID NO: 812639 - DNA, 19 bp, Mus musculus
  siRNA target sequence for 9130011E15Rik (NM_198296.1,697-715).
gctactctgagcaacacaa

SEQ ID NO: 812640 - DNA, 19 bp, Mus musculus
  siRNA target sequence for 9130011E15Rik (NM_198296.1,738-756).
ctggttcggtccattagta

SEQ ID NO: 812641 - DNA, 19 bp, Mus musculus
  siRNA target sequence for C030046M14Rik (NM_198297.1,118-136).
ctggttatatcgttgatct

SEQ ID NO: 812642 - DNA, 19 bp, Mus musculus
  siRNA target sequence for C030046M14Rik (NM_198297.1,121-139).
gttatatcgttgatcttca

SEQ ID NO: 812643 - DNA, 19 bp, Mus musculus
  siRNA target sequence for C030046M14Rik (NM_198297.1,163-181).
cagagacgagatgaaatat

SEQ ID NO: 812644 - DNA, 19 bp, Mus musculus
  siRNA target sequence for C030046M14Rik (NM_198297.1,201-219).
cattccaagagttgatgaa

SEQ ID NO: 812645 - DNA, 19 bp, Mus musculus
  siRNA target sequence for C030046M14Rik (NM_198297.1,239-257).
caatttatggcaatttaga

SEQ ID NO: 812646 - DNA, 19 bp, Mus musculus
  siRNA target sequence for C030046M14Rik (NM_198297.1,283-301).
gagaactgctatgaacaaa

SEQ ID NO: 812647 - DNA, 19 bp, Mus musculus
  siRNA target sequence for C030046M14Rik (NM_198297.1,450-468).
gtcagacagaggaaaggat

SEQ ID NO: 812648 - DNA, 19 bp, Mus musculus
  siRNA target sequence for C030046M14Rik (NM_198297.1,461-479).
gaaaggatacacaagtcta

SEQ ID NO: 812649 - DNA, 19 bp, Mus musculus
  siRNA target sequence for C030046M14Rik (NM_198297.1,465-483).
ggatacacaagtctataca

SEQ ID NO: 812650 - DNA, 19 bp, Mus musculus
  siRNA target sequence for C030046M14Rik (NM_198297.1,491-509).
ccaacgtttctcagatcaa

SEQ ID NO: 812651 - DNA, 19 bp, Mus musculus
  siRNA target sequence for C030046M14Rik (NM_198297.1,492-510).
caacgtttctcagatcaat

SEQ ID NO: 812652 - DNA, 19 bp, Mus musculus
  siRNA target sequence for C030046M14Rik (NM_198297.1,521-539).
gtttcccaccagataacca

SEQ ID NO: 812653 - DNA, 19 bp, Mus musculus
  siRNA target sequence for C030046M14Rik (NM_198297.1,596-614).
ccaagagagagcctgtaat

SEQ ID NO: 812654 - DNA, 19 bp, Mus musculus
  siRNA target sequence for E130303B06Rik (NM_198299.1,310-328).
cctaagaggaagaatccaa

SEQ ID NO: 812655 - DNA, 19 bp, Mus musculus
  siRNA target sequence for E130303B06Rik (NM_198299.1,435-453).
gtggcgctcacccaagtat

SEQ ID NO: 812656 - DNA, 19 bp, Mus musculus
  siRNA target sequence for E130303B06Rik (NM_198299.1,437-455).
ggcgctcacccaagtatga

SEQ ID NO: 812657 - DNA, 19 bp, Mus musculus
  siRNA target sequence for E130303B06Rik (NM_198299.1,439-457).
cgctcacccaagtatgaca

SEQ ID NO: 812658 - DNA, 19 bp, Mus musculus
  siRNA target sequence for E130303B06Rik (NM_198299.1,440-458).
gctcacccaagtatgacaa

SEQ ID NO: 812659 - DNA, 19 bp, Mus musculus
  siRNA target sequence for E130303B06Rik (NM_198299.1,441-459).
ctcacccaagtatgacaat

SEQ ID NO: 812660 - DNA, 19 bp, Mus musculus
  siRNA target sequence for E130303B06Rik (NM_198299.1,622-640).
ggcctaggcgtggatttca

SEQ ID NO: 812661 - DNA, 19 bp, Mus musculus
  siRNA target sequence for E130303B06Rik (NM_198299.1,623-641).
gcctaggcgtggatttcat

SEQ ID NO: 812662 - DNA, 19 bp, Mus musculus
  siRNA target sequence for E130303B06Rik (NM_198299.1,624-642).
cctaggcgtggatttcatt

SEQ ID NO: 812663 - DNA, 19 bp, Mus musculus
  siRNA target sequence for E130303B06Rik (NM_198299.1,625-643).
ctaggcgtggatttcatta

SEQ ID NO: 812664 - DNA, 19 bp, Mus musculus
  siRNA target sequence for E130303B06Rik (NM_198299.1,766-784).
catgtgccccattacttgt

SEQ ID NO: 812665 - DNA, 19 bp, Mus musculus
  siRNA target sequence for E130303B06Rik (NM_198299.1,930-948).
gctacgtgagctagtacta

SEQ ID NO: 812666 - DNA, 19 bp, Mus musculus
  siRNA target sequence for E130303B06Rik (NM_198299.1,931-949).
ctacgtgagctagtactat

SEQ ID NO: 812667 - DNA, 19 bp, Mus musculus
  siRNA target sequence for E130303B06Rik (NM_198299.1,1002-1020).
ccggaagttggtgcaaata

SEQ ID NO: 812668 - DNA, 19 bp, Mus musculus
  siRNA target sequence for E130303B06Rik (NM_198299.1,1043-1061).
cccgacccaaagtctttgt

SEQ ID NO: 812669 - DNA, 19 bp, Mus musculus
  siRNA target sequence for 9830126M18 (NM_198301.1,119-137).
ctcctggatactagttaca

SEQ ID NO: 812670 - DNA, 19 bp, Mus musculus
  siRNA target sequence for 9830126M18 (NM_198301.1,262-280).
ggtggatcggctatctaca

SEQ ID NO: 812671 - DNA, 19 bp, Mus musculus
  siRNA target sequence for 9830126M18 (NM_198301.1,270-288).
ggctatctacagagaaagt

SEQ ID NO: 812672 - DNA, 19 bp, Mus musculus
  siRNA target sequence for 9830126M18 (NM_198301.1,271-289).
gctatctacagagaaagtt

SEQ ID NO: 812673 - DNA, 19 bp, Mus musculus
  siRNA target sequence for 9830126M18 (NM_198301.1,380-398).
gcggaagcttcctgaaaaa

SEQ ID NO: 812674 - DNA, 19 bp, Mus musculus
  siRNA target sequence for 9830126M18 (NM_198301.1,383-401).
gaagcttcctgaaaaacta

SEQ ID NO: 812675 - DNA, 19 bp, Mus musculus
  siRNA target sequence for 9830126M18 (NM_198301.1,424-442).
ggatccagcagtacagttt

SEQ ID NO: 812676 - DNA, 19 bp, Mus musculus
  siRNA target sequence for 9830126M18 (NM_198301.1,439-457).
gtttcgggcctgagaagta

SEQ ID NO: 812677 - DNA, 19 bp, Mus musculus
  siRNA target sequence for 9830126M18 (NM_198301.1,452-470).
gaagtacacaggttccaat

SEQ ID NO: 812678 - DNA, 19 bp, Mus musculus
  siRNA target sequence for 9830126M18 (NM_198301.1,467-485).
caatgtgtttggaaagtta

SEQ ID NO: 812679 - DNA, 19 bp, Mus musculus
  siRNA target sequence for 9830126M18 (NM_198301.1,478-496).
gaaagttacggaaatgtgt

SEQ ID NO: 812680 - DNA, 19 bp, Mus musculus
  siRNA target sequence for 9830126M18 (NM_198301.1,512-530).
gcagtggactgagtttagt

SEQ ID NO: 812681 - DNA, 19 bp, Mus musculus
  siRNA target sequence for 9830126M18 (NM_198301.1,584-602).
cgccatcctggagtgtaaa

SEQ ID NO: 812682 - DNA, 19 bp, Mus musculus
  siRNA target sequence for 9830126M18 (NM_198301.1,586-604).
ccatcctggagtgtaaact

SEQ ID NO: 812683 - DNA, 19 bp, Mus musculus
  siRNA target sequence for 9830126M18 (NM_198301.1,643-661).
cggaagcgtatgagcaaat

SEQ ID NO: 812684 - DNA, 19 bp, Mus musculus
  siRNA target sequence for 9830126M18 (NM_198301.1,645-663).
gaagcgtatgagcaaatga

SEQ ID NO: 812685 - DNA, 19 bp, Mus musculus
  siRNA target sequence for 9830126M18 (NM_198301.1,648-666).
gcgtatgagcaaatgaaga

SEQ ID NO: 812686 - DNA, 19 bp, Mus musculus
  siRNA target sequence for 9830126M18 (NM_198301.1,675-693).
gttatccccagccttttca

SEQ ID NO: 812687 - DNA, 19 bp, Mus musculus
  siRNA target sequence for 9830126M18 (NM_198301.1,743-761).
gaatcacctgaattccata

SEQ ID NO: 812688 - DNA, 19 bp, Mus musculus
  siRNA target sequence for 9830126M18 (NM_198301.1,772-790).
gtggtttggatcagattga

SEQ ID NO: 812689 - DNA, 19 bp, Mus musculus
  siRNA target sequence for 9830126M18 (NM_198301.1,775-793).
gtttggatcagattgacat

SEQ ID NO: 812690 - DNA, 19 bp, Mus musculus
  siRNA target sequence for 9830126M18 (NM_198301.1,780-798).
gatcagattgacatgttta

SEQ ID NO: 812691 - DNA, 19 bp, Mus musculus
  siRNA target sequence for 9830126M18 (NM_198301.1,794-812).
gtttatactcgggtattct

SEQ ID NO: 812692 - DNA, 19 bp, Mus musculus
  siRNA target sequence for 9830126M18 (NM_198301.1,803-821).
cgggtattctcttcaagta

SEQ ID NO: 812693 - DNA, 19 bp, Mus musculus
  siRNA target sequence for 9830126M18 (NM_198301.1,804-822).
gggtattctcttcaagtaa

SEQ ID NO: 812694 - DNA, 19 bp, Mus musculus
  siRNA target sequence for 9830126M18 (NM_198301.1,831-849).
gtgtttcgactgttcaagt

SEQ ID NO: 812695 - DNA, 19 bp, Mus musculus
  siRNA target sequence for 9830126M18 (NM_198301.1,833-851).
gtttcgactgttcaagttt

SEQ ID NO: 812696 - DNA, 19 bp, Mus musculus
  siRNA target sequence for 9830126M18 (NM_198301.1,837-855).
cgactgttcaagtttaact

SEQ ID NO: 812697 - DNA, 19 bp, Mus musculus
  siRNA target sequence for 9830126M18 (NM_198301.1,911-929).
ctccctactgactgagaat

SEQ ID NO: 812698 - DNA, 19 bp, Mus musculus
  siRNA target sequence for A030003E17Rik (NM_198303.1,87-105).
gtgtgaagaaccaatatga

SEQ ID NO: 812699 - DNA, 19 bp, Mus musculus
  siRNA target sequence for A030003E17Rik (NM_198303.1,94-112).
gaaccaatatgaaaagcat

SEQ ID NO: 812700 - DNA, 19 bp, Mus musculus
  siRNA target sequence for A030003E17Rik (NM_198303.1,194-212).
gcctacaaggatgatgaaa

SEQ ID NO: 812701 - DNA, 19 bp, Mus musculus
  siRNA target sequence for A030003E17Rik (NM_198303.1,230-248).
gaattgatccatgagttaa

SEQ ID NO: 812702 - DNA, 19 bp, Mus musculus
  siRNA target sequence for A030003E17Rik (NM_198303.1,378-396).
gcccagtccataaaaagga

SEQ ID NO: 812703 - DNA, 19 bp, Mus musculus
  siRNA target sequence for A030003E17Rik (NM_198303.1,386-404).
cataaaaaggacgttatga

SEQ ID NO: 812704 - DNA, 19 bp, Mus musculus
  siRNA target sequence for A030003E17Rik (NM_198303.1,432-450).
cccagtatgcagtaatttt

SEQ ID NO: 812705 - DNA, 19 bp, Mus musculus
  siRNA target sequence for A030003E17Rik (NM_198303.1,502-520).
gggagttagaatctttagt

SEQ ID NO: 812706 - DNA, 19 bp, Mus musculus
  siRNA target sequence for A030003E17Rik (NM_198303.1,657-675).
ctcgagatccaatagtaat

SEQ ID NO: 812707 - DNA, 19 bp, Mus musculus
  siRNA target sequence for A030003E17Rik (NM_198303.1,691-709).
ggctggtcaagtgaaacaa

SEQ ID NO: 812708 - DNA, 19 bp, Mus musculus
  siRNA target sequence for A030003E17Rik (NM_198303.1,721-739).
gtgcgttccaagcaaaaat

SEQ ID NO: 812709 - DNA, 19 bp, Mus musculus
  siRNA target sequence for A030003E17Rik (NM_198303.1,723-741).
gcgttccaagcaaaaattt

SEQ ID NO: 812710 - DNA, 19 bp, Mus musculus
  siRNA target sequence for A030003E17Rik (NM_198303.1,724-742).
cgttccaagcaaaaatttt

SEQ ID NO: 812711 - DNA, 19 bp, Mus musculus
  siRNA target sequence for A030003E17Rik (NM_198303.1,732-750).
gcaaaaattttgttgacat

SEQ ID NO: 812712 - DNA, 19 bp, Mus musculus
  siRNA target sequence for A030003E17Rik (NM_198303.1,743-761).
gttgacattgggatagtaa

SEQ ID NO: 812713 - DNA, 19 bp, Mus musculus
  siRNA target sequence for A030003E17Rik (NM_198303.1,746-764).
gacattgggatagtaacaa

SEQ ID NO: 812714 - DNA, 19 bp, Mus musculus
  siRNA target sequence for A030003E17Rik (NM_198303.1,758-776).
gtaacaagcattgaaataa

SEQ ID NO: 812715 - DNA, 19 bp, Mus musculus
  siRNA target sequence for A030003E17Rik (NM_198303.1,787-805).
ggtggatgttgcaaaaaaa

SEQ ID NO: 812716 - DNA, 19 bp, Mus musculus
  siRNA target sequence for A030003E17Rik (NM_198303.1,840-858).
ctggggaatctcccaaaat

SEQ ID NO: 812717 - DNA, 19 bp, Mus musculus
  siRNA target sequence for A030003E17Rik (NM_198303.1,842-860).
ggggaatctcccaaaatgt

SEQ ID NO: 812718 - DNA, 19 bp, Mus musculus
  siRNA target sequence for A030003E17Rik (NM_198303.1,913-931).
gtccatcgatgcactcaaa

SEQ ID NO: 812719 - DNA, 19 bp, Mus musculus
  siRNA target sequence for A030003E17Rik (NM_198303.1,960-978).
gtgactggcagcttattgt

SEQ ID NO: 812720 - DNA, 19 bp, Mus musculus
  siRNA target sequence for BC025526 (NM_198304.2,71-89).
ggaggtcagctcttagaga

SEQ ID NO: 812721 - DNA, 19 bp, Mus musculus
  siRNA target sequence for BC025526 (NM_198304.2,86-104).
gagaattgaatcagattga

SEQ ID NO: 812722 - DNA, 19 bp, Mus musculus
  siRNA target sequence for BC025526 (NM_198304.2,99-117).
gattgaggcggaactgaat

SEQ ID NO: 812723 - DNA, 19 bp, Mus musculus
  siRNA target sequence for BC025526 (NM_198304.2,105-123).
ggcggaactgaataaatat

SEQ ID NO: 812724 - DNA, 19 bp, Mus musculus
  siRNA target sequence for BC025526 (NM_198304.2,106-124).
gcggaactgaataaatatt

SEQ ID NO: 812725 - DNA, 19 bp, Mus musculus
  siRNA target sequence for BC025526 (NM_198304.2,139-157).
gaagggctttcttactaca

SEQ ID NO: 812726 - DNA, 19 bp, Mus musculus
  siRNA target sequence for BC025526 (NM_198304.2,179-197).
ctgaaagagtgaaagctaa

SEQ ID NO: 812727 - DNA, 19 bp, Mus musculus
  siRNA target sequence for BC025526 (NM_198304.2,290-308).
gttaccttcaggaggatta

SEQ ID NO: 812728 - DNA, 19 bp, Mus musculus
  siRNA target sequence for BC025526 (NM_198304.2,313-331).
ggtactcgggactcactaa

SEQ ID NO: 812729 - DNA, 19 bp, Mus musculus
  siRNA target sequence for BC025526 (NM_198304.2,314-332).
gtactcgggactcactaaa

SEQ ID NO: 812730 - DNA, 19 bp, Mus musculus
  siRNA target sequence for BC025526 (NM_198304.2,363-381).
ggccttaaccctgaagatt

SEQ ID NO: 812731 - DNA, 19 bp, Mus musculus
  siRNA target sequence for BC025526 (NM_198304.2,373-391).
ctgaagattgcagattatt

SEQ ID NO: 812732 - DNA, 19 bp, Mus musculus
  siRNA target sequence for BC025526 (NM_198304.2,411-429).
cattcttcgttgtgtctta

SEQ ID NO: 812733 - DNA, 19 bp, Mus musculus
  siRNA target sequence for BC025526 (NM_198304.2,426-444).
cttacaccttctgacatat

SEQ ID NO: 812734 - DNA, 19 bp, Mus musculus
  siRNA target sequence for BC025526 (NM_198304.2,637-655).
cagtccatgctgttagaaa

SEQ ID NO: 812735 - DNA, 19 bp, Mus musculus
  siRNA target sequence for BC025526 (NM_198304.2,639-657).
gtccatgctgttagaaatt

SEQ ID NO: 812736 - DNA, 19 bp, Mus musculus
  siRNA target sequence for BC025526 (NM_198304.2,641-659).
ccatgctgttagaaattat

SEQ ID NO: 812737 - DNA, 19 bp, Mus musculus
  siRNA target sequence for BC025526 (NM_198304.2,642-660).
catgctgttagaaattatt

SEQ ID NO: 812738 - DNA, 19 bp, Mus musculus
  siRNA target sequence for BC025526 (NM_198304.2,689-707).
caccaagtgacctattggt

SEQ ID NO: 812739 - DNA, 19 bp, Mus musculus
  siRNA target sequence for BC025526 (NM_198304.2,706-724).
gtactaaccaagatgttca

SEQ ID NO: 812740 - DNA, 19 bp, Mus musculus
  siRNA target sequence for BC025526 (NM_198304.2,770-788).
gtggaaccatggatccttt

SEQ ID NO: 812741 - DNA, 19 bp, Mus musculus
  siRNA target sequence for BC025526 (NM_198304.2,773-791).
gaaccatggatccttttgt

SEQ ID NO: 812742 - DNA, 19 bp, Mus musculus
  siRNA target sequence for BC025526 (NM_198304.2,793-811).
gatcgcattgggtacttca

SEQ ID NO: 812743 - DNA, 19 bp, Mus musculus
  siRNA target sequence for BC025526 (NM_198304.2,936-954).
gttgaccttgggagacatt

SEQ ID NO: 812744 - DNA, 19 bp, Mus musculus
  siRNA target sequence for BC025526 (NM_198304.2,1049-1067).
cggccatccagctgaatgt

SEQ ID NO: 812745 - DNA, 19 bp, Mus musculus
  siRNA target sequence for BC025526 (NM_198304.2,1057-1075).
cagctgaatgtgtttcagt

SEQ ID NO: 812746 - DNA, 19 bp, Mus musculus
  siRNA target sequence for BC025526 (NM_198304.2,1102-1120).
gccagtggaggaaatgatt

SEQ ID NO: 812747 - DNA, 19 bp, Mus musculus
  siRNA target sequence for BC025526 (NM_198304.2,1199-1217).
gcaaccagcaggatgtcat

SEQ ID NO: 812748 - DNA, 19 bp, Mus musculus
  siRNA target sequence for BC025526 (NM_198304.2,1200-1218).
caaccagcaggatgtcatt

SEQ ID NO: 812749 - DNA, 19 bp, Mus musculus
  siRNA target sequence for BC025526 (NM_198304.2,1284-1302).
ctctggtctcgggatcatt

SEQ ID NO: 812750 - DNA, 19 bp, Mus musculus
  siRNA target sequence for BC025526 (NM_198304.2,1286-1304).
ctggtctcgggatcattct

SEQ ID NO: 812751 - DNA, 19 bp, Mus musculus
  siRNA target sequence for BC025526 (NM_198304.2,1382-1400).
ccactgccaaaaaagtgta

SEQ ID NO: 812752 - DNA, 19 bp, Mus musculus
  siRNA target sequence for BC025526 (NM_198304.2,1404-1422).
cttcctggataaaatgtct

SEQ ID NO: 812753 - DNA, 19 bp, Mus musculus
  siRNA target sequence for BC025526 (NM_198304.2,1553-1571).
gcactgtgggccaagtcat

SEQ ID NO: 812754 - DNA, 19 bp, Mus musculus
  siRNA target sequence for BC025526 (NM_198304.2,1597-1615).
cgctgggagtactcttaca

SEQ ID NO: 812755 - DNA, 19 bp, Mus musculus
  siRNA target sequence for BC025526 (NM_198304.2,1695-1713).
gcgggtcaagcccatcatt

SEQ ID NO: 812756 - DNA, 19 bp, Mus musculus
  siRNA target sequence for BC025526 (NM_198304.2,1699-1717).
gtcaagcccatcattgatt

SEQ ID NO: 812757 - DNA, 19 bp, Mus musculus
  siRNA target sequence for BC025526 (NM_198304.2,1704-1722).
gcccatcattgatttggtt

SEQ ID NO: 812758 - DNA, 19 bp, Mus musculus
  siRNA target sequence for BC025526 (NM_198304.2,1825-1843).
cctgtaaacgtcattgctt

SEQ ID NO: 812759 - DNA, 19 bp, Mus musculus
  siRNA target sequence for BC025526 (NM_198304.2,1946-1964).
ccaacatgactcagatgat

SEQ ID NO: 812760 - DNA, 19 bp, Mus musculus
  siRNA target sequence for BC025526 (NM_198304.2,2019-2037).
gcagccccagggcgaatat

SEQ ID NO: 812761 - DNA, 19 bp, Mus musculus
  siRNA target sequence for BC025526 (NM_198304.2,2149-2167).
cttcccagctaccacaaat

SEQ ID NO: 812762 - DNA, 19 bp, Mus musculus
  siRNA target sequence for BC025526 (NM_198304.2,2161-2179).
cacaaatggcgctacaact

SEQ ID NO: 812763 - DNA, 19 bp, Mus musculus
  siRNA target sequence for BC025526 (NM_198304.2,2188-2206).
gtgcgagagctgataggtt

SEQ ID NO: 812764 - DNA, 19 bp, Mus musculus
  siRNA target sequence for BC025526 (NM_198304.2,2221-2239).
ctgattcatgcaatactga

SEQ ID NO: 812765 - DNA, 19 bp, Mus musculus
  siRNA target sequence for BC025526 (NM_198304.2,2323-2341).
gctggacagaccgtcatta

SEQ ID NO: 812766 - DNA, 19 bp, Mus musculus
  siRNA target sequence for BC025526 (NM_198304.2,2326-2344).
ggacagaccgtcattagca

SEQ ID NO: 812767 - DNA, 19 bp, Mus musculus
  siRNA target sequence for BC025526 (NM_198304.2,2356-2374).
ggtgtagacaccatagaca

SEQ ID NO: 812768 - DNA, 19 bp, Mus musculus
  siRNA target sequence for BC025526 (NM_198304.2,2425-2443).
ggccaactgctgatcaaga

SEQ ID NO: 812769 - DNA, 19 bp, Mus musculus
  siRNA target sequence for BC025526 (NM_198304.2,2457-2475).
gttctctgtcaccaacaat

SEQ ID NO: 812770 - DNA, 19 bp, Mus musculus
  siRNA target sequence for BC025526 (NM_198304.2,2484-2502).
gctgaaacctccttctaat

SEQ ID NO: 812771 - DNA, 19 bp, Mus musculus
  siRNA target sequence for BC025526 (NM_198304.2,2566-2584).
gtcctagccaagtacatct

SEQ ID NO: 812772 - DNA, 19 bp, Mus musculus
  siRNA target sequence for BC025526 (NM_198304.2,2649-2667).
ggccccaatgtcagtgtat

SEQ ID NO: 812773 - DNA, 19 bp, Mus musculus
  siRNA target sequence for BC025526 (NM_198304.2,2798-2816).
gtctcatcgagctgtttct

SEQ ID NO: 812774 - DNA, 19 bp, Mus musculus
  siRNA target sequence for BC025526 (NM_198304.2,2800-2818).
ctcatcgagctgtttctga

SEQ ID NO: 812775 - DNA, 19 bp, Mus musculus
  siRNA target sequence for BC025526 (NM_198304.2,2840-2858).
gcaatggctccaaggaatt

SEQ ID NO: 812776 - DNA, 19 bp, Mus musculus
  siRNA target sequence for BC025526 (NM_198304.2,2943-2961).
gttgcatcgtgcagctatt

SEQ ID NO: 812777 - DNA, 19 bp, Mus musculus
  siRNA target sequence for BC025526 (NM_198304.2,3113-3131).
gtgccctgatcatgaagat

SEQ ID NO: 812778 - DNA, 19 bp, Mus musculus
  siRNA target sequence for BC025526 (NM_198304.2,3115-3133).
gccctgatcatgaagataa

SEQ ID NO: 812779 - DNA, 19 bp, Mus musculus
  siRNA target sequence for BC025526 (NM_198304.2,3137-3155).
gtttggagatatactatgt

SEQ ID NO: 812780 - DNA, 19 bp, Mus musculus
  siRNA target sequence for BC025526 (NM_198304.2,3164-3182).
gctcgttagaccagtcatt

SEQ ID NO: 812781 - DNA, 19 bp, Mus musculus
  siRNA target sequence for BC025526 (NM_198304.2,3165-3183).
ctcgttagaccagtcatta

SEQ ID NO: 812782 - DNA, 19 bp, Mus musculus
  siRNA target sequence for BC025526 (NM_198304.2,3167-3185).
cgttagaccagtcattaaa

SEQ ID NO: 812783 - DNA, 19 bp, Mus musculus
  siRNA target sequence for BC025526 (NM_198304.2,3168-3186).
gttagaccagtcattaaaa

SEQ ID NO: 812784 - DNA, 19 bp, Mus musculus
  siRNA target sequence for BC025526 (NM_198304.2,3172-3190).
gaccagtcattaaaagata

SEQ ID NO: 812785 - DNA, 19 bp, Mus musculus
  siRNA target sequence for BC025526 (NM_198304.2,3233-3251).
cagggtacgtcaagtcttt

SEQ ID NO: 812786 - DNA, 19 bp, Mus musculus
  siRNA target sequence for BC025526 (NM_198304.2,3290-3308).
cgtccctgctagagtatca

SEQ ID NO: 812787 - DNA, 19 bp, Mus musculus
  siRNA target sequence for BC025526 (NM_198304.2,3293-3311).
ccctgctagagtatcagat

SEQ ID NO: 812788 - DNA, 19 bp, Mus musculus
  siRNA target sequence for BC025526 (NM_198304.2,3318-3336).
ctccgcctggaggatactt

SEQ ID NO: 812789 - DNA, 19 bp, Mus musculus
  siRNA target sequence for BC025526 (NM_198304.2,3320-3338).
ccgcctggaggatacttct

SEQ ID NO: 812790 - DNA, 19 bp, Mus musculus
  siRNA target sequence for BC025526 (NM_198304.2,3326-3344).
ggaggatacttctcatcat

SEQ ID NO: 812791 - DNA, 19 bp, Mus musculus
  siRNA target sequence for BC025526 (NM_198304.2,3327-3345).
gaggatacttctcatcatt

SEQ ID NO: 812792 - DNA, 19 bp, Mus musculus
  siRNA target sequence for BC025526 (NM_198304.2,3415-3433).
cttgatgggaccaaagcat

SEQ ID NO: 812793 - DNA, 19 bp, Mus musculus
  siRNA target sequence for BC025526 (NM_198304.2,3632-3650).
cattcatcacagtgttaca

SEQ ID NO: 812794 - DNA, 19 bp, Mus musculus
  siRNA target sequence for BC025526 (NM_198304.2,3729-3747).
ggtgattgcactctttgat

SEQ ID NO: 812795 - DNA, 19 bp, Mus musculus
  siRNA target sequence for BC025526 (NM_198304.2,4230-4248).
caagactctacgctacaat

SEQ ID NO: 812796 - DNA, 19 bp, Mus musculus
  siRNA target sequence for BC025526 (NM_198304.2,4254-4272).
gacggaggctctagacttt

SEQ ID NO: 812797 - DNA, 19 bp, Mus musculus
  siRNA target sequence for BC025526 (NM_198304.2,4256-4274).
cggaggctctagactttgt

SEQ ID NO: 812798 - DNA, 19 bp, Mus musculus
  siRNA target sequence for BC025526 (NM_198304.2,4441-4459).
gtgaacctgggttacttgt

SEQ ID NO: 812799 - DNA, 19 bp, Mus musculus
  siRNA target sequence for BC025526 (NM_198304.2,4689-4707).
gtatgggcttctcaagatt

SEQ ID NO: 812800 - DNA, 19 bp, Mus musculus
  siRNA target sequence for BC025526 (NM_198304.2,4780-4798).
gatcttgctgagtacaact

SEQ ID NO: 812801 - DNA, 19 bp, Mus musculus
  siRNA target sequence for BC025526 (NM_198304.2,4960-4978).
gaagggacccgaacattaa

SEQ ID NO: 812802 - DNA, 19 bp, Mus musculus
  siRNA target sequence for BC025526 (NM_198304.2,5104-5122).
gagctgagcacgttgcttt

SEQ ID NO: 812803 - DNA, 19 bp, Mus musculus
  siRNA target sequence for BC025526 (NM_198304.2,5123-5141).
ccagcctctcacgatactt

SEQ ID NO: 812804 - DNA, 19 bp, Mus musculus
  siRNA target sequence for BC058738 (NM_198305.1,270-288).
gtgtggcacacaactcaaa

SEQ ID NO: 812805 - DNA, 19 bp, Mus musculus
  siRNA target sequence for BC058738 (NM_198305.1,292-310).
gcactaccatgatgctttt

SEQ ID NO: 812806 - DNA, 19 bp, Mus musculus
  siRNA target sequence for BC058738 (NM_198305.1,424-442).
ccacgccatgttcacaaat

SEQ ID NO: 812807 - DNA, 19 bp, Mus musculus
  siRNA target sequence for BC058738 (NM_198305.1,506-524).
cagctggtgcagtttgcat

SEQ ID NO: 812808 - DNA, 19 bp, Mus musculus
  siRNA target sequence for BC058738 (NM_198305.1,511-529).
ggtgcagtttgcatacaca

SEQ ID NO: 812809 - DNA, 19 bp, Mus musculus
  siRNA target sequence for BC058738 (NM_198305.1,580-598).
cagccttctacagttgaat

SEQ ID NO: 812810 - DNA, 19 bp, Mus musculus
  siRNA target sequence for BC058738 (NM_198305.1,655-673).
cctgggcattcgaggattt

SEQ ID NO: 812811 - DNA, 19 bp, Mus musculus
  siRNA target sequence for BC058738 (NM_198305.1,658-676).
gggcattcgaggatttgca

SEQ ID NO: 812812 - DNA, 19 bp, Mus musculus
  siRNA target sequence for BC058738 (NM_198305.1,890-908).
catgtaccaaggttgatga

SEQ ID NO: 812813 - DNA, 19 bp, Mus musculus
  siRNA target sequence for BC058738 (NM_198305.1,1004-1022).
ctcatcgaggcccttaagt

SEQ ID NO: 812814 - DNA, 19 bp, Mus musculus
  siRNA target sequence for BC058738 (NM_198305.1,1145-1163).
gactgtgaagcgtatgaca

SEQ ID NO: 812815 - DNA, 19 bp, Mus musculus
  siRNA target sequence for BC058738 (NM_198305.1,1231-1249).
cgtcgggaaccgactgtat

SEQ ID NO: 812816 - DNA, 19 bp, Mus musculus
  siRNA target sequence for BC058738 (NM_198305.1,1423-1441).
caacagtgctgaacgatat

SEQ ID NO: 812817 - DNA, 19 bp, Mus musculus
  siRNA target sequence for BC058738 (NM_198305.1,1453-1471).
gggaacatggacatccatt

SEQ ID NO: 812818 - DNA, 19 bp, Mus musculus
  siRNA target sequence for BC058738 (NM_198305.1,1501-1519).
gcgtgtggccacacttgat

SEQ ID NO: 812819 - DNA, 19 bp, Mus musculus
  siRNA target sequence for BC058738 (NM_198305.1,1528-1546).
gtacgccgtgggtggttat

SEQ ID NO: 812820 - DNA, 19 bp, Mus musculus
  siRNA target sequence for BC058738 (NM_198305.1,1532-1550).
gccgtgggtggttatgaca

SEQ ID NO: 812821 - DNA, 19 bp, Mus musculus
  siRNA target sequence for BC058738 (NM_198305.1,1583-1601).
gagccccaggtgaattcat

SEQ ID NO: 812822 - DNA, 19 bp, Mus musculus
  siRNA target sequence for BC058738 (NM_198305.1,1747-1765).
gagtgtggcacccatgaat

SEQ ID NO: 812823 - DNA, 19 bp, Mus musculus
  siRNA target sequence for Galnt9 (NM_198306.1,46-64).
cgtacggagaggtgagaaa

SEQ ID NO: 812824 - DNA, 19 bp, Mus musculus
  siRNA target sequence for Galnt9 (NM_198306.1,386-404).
ctttgggctgcggttagta

SEQ ID NO: 812825 - DNA, 19 bp, Mus musculus
  siRNA target sequence for Galnt9 (NM_198306.1,391-409).
ggctgcggttagtagtaca

SEQ ID NO: 812826 - DNA, 19 bp, Mus musculus
  siRNA target sequence for 4921501M07 (NM_198307.1,339-357).
gaaactgcaaacgacatta

SEQ ID NO: 812827 - DNA, 19 bp, Mus musculus
  siRNA target sequence for 4921501M07 (NM_198307.1,434-452).
ggcaaggagtcttggataa

SEQ ID NO: 812828 - DNA, 19 bp, Mus musculus
  siRNA target sequence for 4921501M07 (NM_198307.1,435-453).
gcaaggagtcttggataat

SEQ ID NO: 812829 - DNA, 19 bp, Mus musculus
  siRNA target sequence for 4921501M07 (NM_198307.1,513-531).
gcgtcttgaaggcagttta

SEQ ID NO: 812830 - DNA, 19 bp, Mus musculus
  siRNA target sequence for 4921501M07 (NM_198307.1,556-574).
cagctgagccaagaactaa

SEQ ID NO: 812831 - DNA, 19 bp, Mus musculus
  siRNA target sequence for 4921501M07 (NM_198307.1,561-579).
gagccaagaactaatggaa

SEQ ID NO: 812832 - DNA, 19 bp, Mus musculus
  siRNA target sequence for 4921501M07 (NM_198307.1,563-581).
gccaagaactaatggaaaa

SEQ ID NO: 812833 - DNA, 19 bp, Mus musculus
  siRNA target sequence for 4921501M07 (NM_198307.1,599-617).
ggatggaagggcataacaa

SEQ ID NO: 812834 - DNA, 19 bp, Mus musculus
  siRNA target sequence for 4921501M07 (NM_198307.1,619-637).
gagtaccggacagagataa

SEQ ID NO: 812835 - DNA, 19 bp, Mus musculus
  siRNA target sequence for 4921501M07 (NM_198307.1,664-682).
gctgatcagacctacagtt

SEQ ID NO: 812836 - DNA, 19 bp, Mus musculus
  siRNA target sequence for 4921501M07 (NM_198307.1,732-750).
gcaccagcgagatatcact

SEQ ID NO: 812837 - DNA, 19 bp, Mus musculus
  siRNA target sequence for 4921501M07 (NM_198307.1,733-751).
caccagcgagatatcacta

SEQ ID NO: 812838 - DNA, 19 bp, Mus musculus
  siRNA target sequence for 4921501M07 (NM_198307.1,735-753).
ccagcgagatatcactatt

SEQ ID NO: 812839 - DNA, 19 bp, Mus musculus
  siRNA target sequence for 4921501M07 (NM_198307.1,738-756).
gcgagatatcactattgct

SEQ ID NO: 812840 - DNA, 19 bp, Mus musculus
  siRNA target sequence for 4921501M07 (NM_198307.1,739-757).
cgagatatcactattgctt

SEQ ID NO: 812841 - DNA, 19 bp, Mus musculus
  siRNA target sequence for 4921501M07 (NM_198307.1,834-852).
gcataaggagattctaagt

SEQ ID NO: 812842 - DNA, 19 bp, Mus musculus
  siRNA target sequence for 4921501M07 (NM_198307.1,855-873).
gctggaatctctcaaatta

SEQ ID NO: 812843 - DNA, 19 bp, Mus musculus
  siRNA target sequence for 4921501M07 (NM_198307.1,946-964).
cctctgggatcgatagcta

SEQ ID NO: 812844 - DNA, 19 bp, Mus musculus
  siRNA target sequence for 4921501M07 (NM_198307.1,990-1008).
gaggtctcaccatattcta

SEQ ID NO: 812845 - DNA, 19 bp, Mus musculus
  siRNA target sequence for 4921501M07 (NM_198307.1,992-1010).
ggtctcaccatattctaga

SEQ ID NO: 812846 - DNA, 19 bp, Mus musculus
  siRNA target sequence for 4921501M07 (NM_198307.1,1013-1031).
gcctggacgcccacattga

SEQ ID NO: 812847 - DNA, 19 bp, Mus musculus
  siRNA target sequence for 4921501M07 (NM_198307.1,1014-1032).
cctggacgcccacattgaa

SEQ ID NO: 812848 - DNA, 19 bp, Mus musculus
  siRNA target sequence for 4930402E16Rik (NM_198308.1,224-242).
ctgcggaggcacattctat

SEQ ID NO: 812849 - DNA, 19 bp, Mus musculus
  siRNA target sequence for 4930402E16Rik (NM_198308.1,228-246).
ggaggcacattctattgct

SEQ ID NO: 812850 - DNA, 19 bp, Mus musculus
  siRNA target sequence for 4930402E16Rik (NM_198308.1,304-322).
gcctatcacctctccaaaa

SEQ ID NO: 812851 - DNA, 19 bp, Mus musculus
  siRNA target sequence for 4930402E16Rik (NM_198308.1,329-347).
ggcaagatattgtcctttt

SEQ ID NO: 812852 - DNA, 19 bp, Mus musculus
  siRNA target sequence for 4930402E16Rik (NM_198308.1,416-434).
caagcgttgagcagaagat

SEQ ID NO: 812853 - DNA, 19 bp, Mus musculus
  siRNA target sequence for 4930402E16Rik (NM_198308.1,427-445).
cagaagatggctaactatt

SEQ ID NO: 812854 - DNA, 19 bp, Mus musculus
  siRNA target sequence for 4930402E16Rik (NM_198308.1,429-447).
gaagatggctaactattca

SEQ ID NO: 812855 - DNA, 19 bp, Mus musculus
  siRNA target sequence for 4930402E16Rik (NM_198308.1,435-453).
ggctaactattcaaacaaa

SEQ ID NO: 812856 - DNA, 19 bp, Mus musculus
  siRNA target sequence for 4930402E16Rik (NM_198308.1,450-468).
caaactctaccatcagtta

SEQ ID NO: 812857 - DNA, 19 bp, Mus musculus
  siRNA target sequence for 4930402E16Rik (NM_198308.1,483-501).
gatccaaacaggttactta

SEQ ID NO: 812858 - DNA, 19 bp, Mus musculus
  siRNA target sequence for 4930402E16Rik (NM_198308.1,487-505).
caaacaggttacttaagga

SEQ ID NO: 812859 - DNA, 19 bp, Mus musculus
  siRNA target sequence for 4930402E16Rik (NM_198308.1,550-568).
ctgaagcgtatcaactcaa

SEQ ID NO: 812860 - DNA, 19 bp, Mus musculus
  siRNA target sequence for 4930402E16Rik (NM_198308.1,561-579).
caactcaaggctgaatgtt

SEQ ID NO: 812861 - DNA, 19 bp, Mus musculus
  siRNA target sequence for 4930402E16Rik (NM_198308.1,564-582).
ctcaaggctgaatgttgta

SEQ ID NO: 812862 - DNA, 19 bp, Mus musculus
  siRNA target sequence for 4930402E16Rik (NM_198308.1,584-602).
gtatcccttctgagatcat

SEQ ID NO: 812863 - DNA, 19 bp, Mus musculus
  siRNA target sequence for 4930402E16Rik (NM_198308.1,735-753).
gaatggtgttcagatttat

SEQ ID NO: 812864 - DNA, 19 bp, Mus musculus
  siRNA target sequence for 4930402E16Rik (NM_198308.1,764-782).
gtgttcttcacgtactgat

SEQ ID NO: 812865 - DNA, 19 bp, Mus musculus
  siRNA target sequence for 4930402E16Rik (NM_198308.1,769-787).
cttcacgtactgatcaaaa

SEQ ID NO: 812866 - DNA, 19 bp, Mus musculus
  siRNA target sequence for 4930402E16Rik (NM_198308.1,783-801).
caaaaaaggtcaagttact

SEQ ID NO: 812867 - DNA, 19 bp, Mus musculus
  siRNA target sequence for 4930402E16Rik (NM_198308.1,814-832).
gacaaaggacagatcgaat

SEQ ID NO: 812868 - DNA, 19 bp, Mus musculus
  siRNA target sequence for 4930402E16Rik (NM_198308.1,823-841).
cagatcgaatgccagtatt

SEQ ID NO: 812869 - DNA, 19 bp, Mus musculus
  siRNA target sequence for 4930402E16Rik (NM_198308.1,825-843).
gatcgaatgccagtatttt

SEQ ID NO: 812870 - DNA, 19 bp, Mus musculus
  siRNA target sequence for 4930402E16Rik (NM_198308.1,966-984).
gagcaacacaccaaccatt

SEQ ID NO: 812871 - DNA, 19 bp, Mus musculus
  siRNA target sequence for 4930402E16Rik (NM_198308.1,998-1016).
gaagaatttacattaggaa

SEQ ID NO: 812872 - DNA, 19 bp, Mus musculus
  siRNA target sequence for 4930402E16Rik (NM_198308.1,1056-1074).
ccccaaacctattttcact

SEQ ID NO: 812873 - DNA, 19 bp, Mus musculus
  siRNA target sequence for 4930402E16Rik (NM_198308.1,1109-1127).
gtgaagactgggatcactt

SEQ ID NO: 812874 - DNA, 19 bp, Mus musculus
  siRNA target sequence for 4930402E16Rik (NM_198308.1,1239-1257).
gggcgagtctcctgtagta

SEQ ID NO: 812875 - DNA, 19 bp, Mus musculus
  siRNA target sequence for 4930402E16Rik (NM_198308.1,1241-1259).
gcgagtctcctgtagtaca

SEQ ID NO: 812876 - DNA, 19 bp, Mus musculus
  siRNA target sequence for 4930402E16Rik (NM_198308.1,1327-1345).
ctagcagaatggatggtat

SEQ ID NO: 812877 - DNA, 19 bp, Mus musculus
  siRNA target sequence for 4930402E16Rik (NM_198308.1,1333-1351).
gaatggatggtatatggtt

SEQ ID NO: 812878 - DNA, 19 bp, Mus musculus
  siRNA target sequence for 4930402E16Rik (NM_198308.1,1426-1444).
caccgggtcatggaagtta

SEQ ID NO: 812879 - DNA, 19 bp, Mus musculus
  siRNA target sequence for 4930402E16Rik (NM_198308.1,1505-1523).
gtacatctcctctttatga

SEQ ID NO: 812880 - DNA, 19 bp, Mus musculus
  siRNA target sequence for 4930402E16Rik (NM_198308.1,1572-1590).
gaggccaaagtactttgtt

SEQ ID NO: 812881 - DNA, 19 bp, Mus musculus
  siRNA target sequence for 4930402E16Rik (NM_198308.1,1635-1653).
ctacaagccagattggttt

SEQ ID NO: 812882 - DNA, 19 bp, Mus musculus
  siRNA target sequence for 4930402E16Rik (NM_198308.1,1663-1681).
gagtcagaagtcaaatgct

SEQ ID NO: 812883 - DNA, 19 bp, Mus musculus
  siRNA target sequence for 4930402E16Rik (NM_198308.1,1744-1762).
ggggacgaggcgttagaaa

SEQ ID NO: 812884 - DNA, 19 bp, Mus musculus
  siRNA target sequence for 4930402E16Rik (NM_198308.1,1801-1819).
gtaggccacatcgttcata

SEQ ID NO: 812885 - DNA, 19 bp, Mus musculus
  siRNA target sequence for 4930402E16Rik (NM_198308.1,1834-1852).
gaatatggaggatacgaaa

SEQ ID NO: 812886 - DNA, 19 bp, Mus musculus
  siRNA target sequence for 4930402E16Rik (NM_198308.1,1875-1893).
gaccaaacgcagtttcttt

SEQ ID NO: 812887 - DNA, 19 bp, Mus musculus
  siRNA target sequence for 4930402E16Rik (NM_198308.1,1925-1943).
gttgggcctggcttaacaa

SEQ ID NO: 812888 - DNA, 19 bp, Mus musculus
  siRNA target sequence for 4930402E16Rik (NM_198308.1,1928-1946).
gggcctggcttaacaaata

SEQ ID NO: 812889 - DNA, 19 bp, Mus musculus
  siRNA target sequence for 4930402E16Rik (NM_198308.1,1975-1993).
gaggacgtcacctggaaat

SEQ ID NO: 812890 - DNA, 19 bp, Mus musculus
  siRNA target sequence for 4930402E16Rik (NM_198308.1,1995-2013).
cacagccctcaatctgatt

SEQ ID NO: 812891 - DNA, 19 bp, Mus musculus
  siRNA target sequence for 4930402E16Rik (NM_198308.1,2046-2064).
gtcctatgcccctatgact

SEQ ID NO: 812892 - DNA, 19 bp, Mus musculus
  siRNA target sequence for 4930402E16Rik (NM_198308.1,2119-2137).
gggatccgggtgatgagta

SEQ ID NO: 812893 - DNA, 19 bp, Mus musculus
  siRNA target sequence for 4930402E16Rik (NM_198308.1,2120-2138).
ggatccgggtgatgagtat

SEQ ID NO: 812894 - DNA, 19 bp, Mus musculus
  siRNA target sequence for 4930402E16Rik (NM_198308.1,2155-2173).
ccaggcttcatgctgtata

SEQ ID NO: 812895 - DNA, 19 bp, Mus musculus
  siRNA target sequence for 4930402E16Rik (NM_198308.1,2156-2174).
caggcttcatgctgtatat

SEQ ID NO: 812896 - DNA, 19 bp, Mus musculus
  siRNA target sequence for 4930402E16Rik (NM_198308.1,2167-2185).
ctgtatatccccatagagt

SEQ ID NO: 812897 - DNA, 19 bp, Mus musculus
  siRNA target sequence for 4930402E16Rik (NM_198308.1,2214-2232).
gagtgttggacagaaatat

SEQ ID NO: 812898 - DNA, 19 bp, Mus musculus
  siRNA target sequence for 4930402E16Rik (NM_198308.1,2218-2236).
gttggacagaaatatggaa

SEQ ID NO: 812899 - DNA, 19 bp, Mus musculus
  siRNA target sequence for 4930402E16Rik (NM_198308.1,2267-2285).
gtctccgaattgagaagtt

SEQ ID NO: 812900 - DNA, 19 bp, Mus musculus
  siRNA target sequence for 4930402E16Rik (NM_198308.1,2269-2287).
ctccgaattgagaagtttt

SEQ ID NO: 812901 - DNA, 19 bp, Mus musculus
  siRNA target sequence for 4930402E16Rik (NM_198308.1,2271-2289).
ccgaattgagaagtttttt

SEQ ID NO: 812902 - DNA, 19 bp, Mus musculus
  siRNA target sequence for 4930402E16Rik (NM_198308.1,2316-2334).
ccttaccacgcctttggaa

SEQ ID NO: 812903 - DNA, 19 bp, Mus musculus
  siRNA target sequence for 4930402E16Rik (NM_198308.1,2331-2349).
ggaatgtggaggagaatct

SEQ ID NO: 812904 - DNA, 19 bp, Mus musculus
  siRNA target sequence for 4930402E16Rik (NM_198308.1,2348-2366).
ctcgagtgaagttagagaa

SEQ ID NO: 812905 - DNA, 19 bp, Mus musculus
  siRNA target sequence for 4930402E16Rik (NM_198308.1,2427-2445).
gcgccttgctatgttcatt

SEQ ID NO: 812906 - DNA, 19 bp, Mus musculus
  siRNA target sequence for 4930402E16Rik (NM_198308.1,2429-2447).
gccttgctatgttcattct

SEQ ID NO: 812907 - DNA, 19 bp, Mus musculus
  siRNA target sequence for 4930402E16Rik (NM_198308.1,2455-2473).
catgacacagaccttgatt

SEQ ID NO: 812908 - DNA, 19 bp, Mus musculus
  siRNA target sequence for 4930402E16Rik (NM_198308.1,2458-2476).
gacacagaccttgatttgt

SEQ ID NO: 812909 - DNA, 19 bp, Mus musculus
  siRNA target sequence for 4930402E16Rik (NM_198308.1,2483-2501).
ggtggggagaacccattta

SEQ ID NO: 812910 - DNA, 19 bp, Mus musculus
  siRNA target sequence for 4930402E16Rik (NM_198308.1,2531-2549).
ccagtagtgcctatagcta

SEQ ID NO: 812911 - DNA, 19 bp, Mus musculus
  siRNA target sequence for 4930402E16Rik (NM_198308.1,2570-2588).
gcctgggttatgtacacaa

SEQ ID NO: 812912 - DNA, 19 bp, Mus musculus
  siRNA target sequence for 4930402E16Rik (NM_198308.1,2571-2589).
cctgggttatgtacacaat

SEQ ID NO: 812913 - DNA, 19 bp, Mus musculus
  siRNA target sequence for 4930402E16Rik (NM_198308.1,2574-2592).
gggttatgtacacaatttt

SEQ ID NO: 812914 - DNA, 19 bp, Mus musculus
  siRNA target sequence for 4930402E16Rik (NM_198308.1,2617-2635).
gtggtgacaacagatttca

SEQ ID NO: 812915 - DNA, 19 bp, Mus musculus
  siRNA target sequence for 4930402E16Rik (NM_198308.1,2637-2655).
caaccgaggagaatatgaa

SEQ ID NO: 812916 - DNA, 19 bp, Mus musculus
  siRNA target sequence for 4930402E16Rik (NM_198308.1,2645-2663).
gagaatatgaaattgacat

SEQ ID NO: 812917 - DNA, 19 bp, Mus musculus
  siRNA target sequence for Ttc8 (NM_198311.1,196-214).
gtctcaggcggcttggatt

SEQ ID NO: 812918 - DNA, 19 bp, Mus musculus
  siRNA target sequence for p47 (NM_198326.1,533-551).
caggccaggatgttcatgt

SEQ ID NO: 812919 - DNA, 19 bp, Mus musculus
  siRNA target sequence for p47 (NM_198326.1,553-571).
gtgctaaagctctggaaaa

SEQ ID NO: 812920 - DNA, 19 bp, Mus musculus
  siRNA target sequence for p47 (NM_198326.1,606-624).
ctaccaagacccatccaat

SEQ ID NO: 812921 - DNA, 19 bp, Mus musculus
  siRNA target sequence for Rai2 (NM_198409.1,309-327).
cctcccactttggctaata

SEQ ID NO: 812922 - DNA, 19 bp, Mus musculus
  siRNA target sequence for Rai2 (NM_198409.1,312-330).
cccactttggctaataaca

SEQ ID NO: 812923 - DNA, 19 bp, Mus musculus
  siRNA target sequence for Rai2 (NM_198409.1,364-382).
ccgaggcctggaacatcaa

SEQ ID NO: 812924 - DNA, 19 bp, Mus musculus
  siRNA target sequence for Rai2 (NM_198409.1,366-384).
gaggcctggaacatcaact

SEQ ID NO: 812925 - DNA, 19 bp, Mus musculus
  siRNA target sequence for Rai2 (NM_198409.1,582-600).
ggcaacgctacctacgtta

SEQ ID NO: 812926 - DNA, 19 bp, Mus musculus
  siRNA target sequence for Rai2 (NM_198409.1,583-601).
gcaacgctacctacgttat

SEQ ID NO: 812927 - DNA, 19 bp, Mus musculus
  siRNA target sequence for Rai2 (NM_198409.1,633-651).
gtgttggaacagcatgttt

SEQ ID NO: 812928 - DNA, 19 bp, Mus musculus
  siRNA target sequence for Rai2 (NM_198409.1,693-711).
ccgtgctcctccaatgcta

SEQ ID NO: 812929 - DNA, 19 bp, Mus musculus
  siRNA target sequence for Rai2 (NM_198409.1,694-712).
cgtgctcctccaatgctat

SEQ ID NO: 812930 - DNA, 19 bp, Mus musculus
  siRNA target sequence for Rai2 (NM_198409.1,797-815).
gcccgcattgccttttgaa

SEQ ID NO: 812931 - DNA, 19 bp, Mus musculus
  siRNA target sequence for Rai2 (NM_198409.1,953-971).
ggtgccctatcctgtgatt

SEQ ID NO: 812932 - DNA, 19 bp, Mus musculus
  siRNA target sequence for Rai2 (NM_198409.1,1014-1032).
gtgcctcagagtactgaat

SEQ ID NO: 812933 - DNA, 19 bp, Mus musculus
  siRNA target sequence for Rai2 (NM_198409.1,1073-1091).
cggcttgcactcctttaaa

SEQ ID NO: 812934 - DNA, 19 bp, Mus musculus
  siRNA target sequence for Rai2 (NM_198409.1,1119-1137).
gaactgaagcccttagaca

SEQ ID NO: 812935 - DNA, 19 bp, Mus musculus
  siRNA target sequence for Rai2 (NM_198409.1,1168-1186).
gccgccacacagtcatcaa

SEQ ID NO: 812936 - DNA, 19 bp, Mus musculus
  siRNA target sequence for Rai2 (NM_198409.1,1170-1188).
cgccacacagtcatcaaga

SEQ ID NO: 812937 - DNA, 19 bp, Mus musculus
  siRNA target sequence for Rai2 (NM_198409.1,1324-1342).
ctcctccagagacattgta

SEQ ID NO: 812938 - DNA, 19 bp, Mus musculus
  siRNA target sequence for Rai2 (NM_198409.1,1327-1345).
ctccagagacattgtataa

SEQ ID NO: 812939 - DNA, 19 bp, Mus musculus
  siRNA target sequence for Rai2 (NM_198409.1,1376-1394).
caccatactggagaaactt

SEQ ID NO: 812940 - DNA, 19 bp, Mus musculus
  siRNA target sequence for Rai2 (NM_198409.1,1527-1545).
gctgaaaataacattgaga

SEQ ID NO: 812941 - DNA, 19 bp, Mus musculus
  siRNA target sequence for Rai2 (NM_198409.1,1633-1651).
caggggtatccaccaaaaa

SEQ ID NO: 812942 - DNA, 19 bp, Mus musculus
  siRNA target sequence for Rai2 (NM_198409.1,1636-1654).
gggtatccaccaaaaactt

SEQ ID NO: 812943 - DNA, 19 bp, Mus musculus
  siRNA target sequence for Rai2 (NM_198409.1,1638-1656).
gtatccaccaaaaacttct

SEQ ID NO: 812944 - DNA, 19 bp, Mus musculus
  siRNA target sequence for Rai2 (NM_198409.1,1727-1745).
cgccgagccccttaggaaa

SEQ ID NO: 812945 - DNA, 19 bp, Mus musculus
  siRNA target sequence for Rai2 (NM_198409.1,1818-1836).
caacggctggccacctttt

SEQ ID NO: 812946 - DNA, 19 bp, Mus musculus
  siRNA target sequence for 1500001B10Rik (NM_198410.1,184-202).
ctccttccagatgactaat

SEQ ID NO: 812947 - DNA, 19 bp, Mus musculus
  siRNA target sequence for 1500001B10Rik (NM_198410.1,521-539).
gctgctgcgctcaactctt

SEQ ID NO: 812948 - DNA, 19 bp, Mus musculus
  siRNA target sequence for 1500001B10Rik (NM_198410.1,522-540).
ctgctgcgctcaactcttt

SEQ ID NO: 812949 - DNA, 19 bp, Mus musculus
  siRNA target sequence for 1500001B10Rik (NM_198410.1,569-587).
cggttcccagagctagaat

SEQ ID NO: 812950 - DNA, 19 bp, Mus musculus
  siRNA target sequence for 1500001B10Rik (NM_198410.1,570-588).
ggttcccagagctagaata

SEQ ID NO: 812951 - DNA, 19 bp, Mus musculus
  siRNA target sequence for 1500001B10Rik (NM_198410.1,798-816).
ctgggcgcttcgactatat

SEQ ID NO: 812952 - DNA, 19 bp, Mus musculus
  siRNA target sequence for 1500001B10Rik (NM_198410.1,825-843).
gccaccagctgttccatat

SEQ ID NO: 812953 - DNA, 19 bp, Mus musculus
  siRNA target sequence for 1500001B10Rik (NM_198410.1,827-845).
caccagctgttccatatct

SEQ ID NO: 812954 - DNA, 19 bp, Mus musculus
  siRNA target sequence for 1500001B10Rik (NM_198410.1,829-847).
ccagctgttccatatctgt

SEQ ID NO: 812955 - DNA, 19 bp, Mus musculus
  siRNA target sequence for 1500001B10Rik (NM_198410.1,961-979).
cttgagcctggcagtgatt

SEQ ID NO: 812956 - DNA, 19 bp, Mus musculus
  siRNA target sequence for 1500001B10Rik (NM_198410.1,1069-1087).
gggactccaagctaaacaa

SEQ ID NO: 812957 - DNA, 19 bp, Mus musculus
  siRNA target sequence for 2610204M08Rik (NM_198411.1,391-409).
catcttcctgaagcaattt

SEQ ID NO: 812958 - DNA, 19 bp, Mus musculus
  siRNA target sequence for 2610204M08Rik (NM_198411.1,403-421).
gcaatttaaatgttccaat

SEQ ID NO: 812959 - DNA, 19 bp, Mus musculus
  siRNA target sequence for 2610204M08Rik (NM_198411.1,450-468).
gagacaccagcaagtttga

SEQ ID NO: 812960 - DNA, 19 bp, Mus musculus
  siRNA target sequence for 2610204M08Rik (NM_198411.1,542-560).
gaggagcgagccaagttgt

SEQ ID NO: 812961 - DNA, 19 bp, Mus musculus
  siRNA target sequence for 2610204M08Rik (NM_198411.1,789-807).
gagatgcagatggtttcaa

SEQ ID NO: 812962 - DNA, 19 bp, Mus musculus
  siRNA target sequence for 2610204M08Rik (NM_198411.1,794-812).
gcagatggtttcaagatta

SEQ ID NO: 812963 - DNA, 19 bp, Mus musculus
  siRNA target sequence for 2610204M08Rik (NM_198411.1,797-815).
gatggtttcaagattagca

SEQ ID NO: 812964 - DNA, 19 bp, Mus musculus
  siRNA target sequence for 2610204M08Rik (NM_198411.1,1117-1135).
cgccattgagcaaaagaaa

SEQ ID NO: 812965 - DNA, 19 bp, Mus musculus
  siRNA target sequence for 2610204M08Rik (NM_198411.1,1780-1798).
cctcgagttctctagcaat

SEQ ID NO: 812966 - DNA, 19 bp, Mus musculus
  siRNA target sequence for 2610204M08Rik (NM_198411.1,1781-1799).
ctcgagttctctagcaata

SEQ ID NO: 812967 - DNA, 19 bp, Mus musculus
  siRNA target sequence for 2610204M08Rik (NM_198411.1,2021-2039).
gaggacgcagtgacagatt

SEQ ID NO: 812968 - DNA, 19 bp, Mus musculus
  siRNA target sequence for Dnajc6 (NM_198412.1,291-309).
ctatgggggaggccttttt

SEQ ID NO: 812969 - DNA, 19 bp, Mus musculus
  siRNA target sequence for Dnajc6 (NM_198412.1,325-343).
ggtgcagggaggctattca

SEQ ID NO: 812970 - DNA, 19 bp, Mus musculus
  siRNA target sequence for Dnajc6 (NM_198412.1,328-346).
gcagggaggctattcagta

SEQ ID NO: 812971 - DNA, 19 bp, Mus musculus
  siRNA target sequence for Dnajc6 (NM_198412.1,329-347).
cagggaggctattcagtaa

SEQ ID NO: 812972 - DNA, 19 bp, Mus musculus
  siRNA target sequence for Dnajc6 (NM_198412.1,360-378).
cttgaaagacactctcaaa

SEQ ID NO: 812973 - DNA, 19 bp, Mus musculus
  siRNA target sequence for Dnajc6 (NM_198412.1,404-422).
ctgttagcagctacacaaa

SEQ ID NO: 812974 - DNA, 19 bp, Mus musculus
  siRNA target sequence for Dnajc6 (NM_198412.1,419-437).
caaagggagacctagactt

SEQ ID NO: 812975 - DNA, 19 bp, Mus musculus
  siRNA target sequence for Dnajc6 (NM_198412.1,470-488).
cctttcctgtggatagtgt

SEQ ID NO: 812976 - DNA, 19 bp, Mus musculus
  siRNA target sequence for Dnajc6 (NM_198412.1,481-499).
gatagtgttgacataggat

SEQ ID NO: 812977 - DNA, 19 bp, Mus musculus
  siRNA target sequence for Dnajc6 (NM_198412.1,519-537).
catccgtagctttttggat

SEQ ID NO: 812978 - DNA, 19 bp, Mus musculus
  siRNA target sequence for Dnajc6 (NM_198412.1,667-685).
gctgtgtgtaggaatatgt

SEQ ID NO: 812979 - DNA, 19 bp, Mus musculus
  siRNA target sequence for Dnajc6 (NM_198412.1,762-780).
ggttggtgctatgttcatt

SEQ ID NO: 812980 - DNA, 19 bp, Mus musculus
  siRNA target sequence for Dnajc6 (NM_198412.1,803-821).
ctggccctgctgttcgatt

SEQ ID NO: 812981 - DNA, 19 bp, Mus musculus
  siRNA target sequence for Dnajc6 (NM_198412.1,806-824).
gccctgctgttcgattact

SEQ ID NO: 812982 - DNA, 19 bp, Mus musculus
  siRNA target sequence for Dnajc6 (NM_198412.1,808-826).
cctgctgttcgattactct

SEQ ID NO: 812983 - DNA, 19 bp, Mus musculus
  siRNA target sequence for Dnajc6 (NM_198412.1,828-846).
cgcaaagcgaccaggaatt

SEQ ID NO: 812984 - DNA, 19 bp, Mus musculus
  siRNA target sequence for Dnajc6 (NM_198412.1,887-905).
gcgacctacttgcagataa

SEQ ID NO: 812985 - DNA, 19 bp, Mus musculus
  siRNA target sequence for Dnajc6 (NM_198412.1,958-976).
ccagttcccttcttcaata

SEQ ID NO: 812986 - DNA, 19 bp, Mus musculus
  siRNA target sequence for Dnajc6 (NM_198412.1,959-977).
cagttcccttcttcaataa

SEQ ID NO: 812987 - DNA, 19 bp, Mus musculus
  siRNA target sequence for Dnajc6 (NM_198412.1,1075-1093).
gtccaagatgggaaaatct

SEQ ID NO: 812988 - DNA, 19 bp, Mus musculus
  siRNA target sequence for Dnajc6 (NM_198412.1,1117-1135).
caaggtgatgtcatcgttt

SEQ ID NO: 812989 - DNA, 19 bp, Mus musculus
  siRNA target sequence for Dnajc6 (NM_198412.1,1121-1139).
gtgatgtcatcgtttccat

SEQ ID NO: 812990 - DNA, 19 bp, Mus musculus
  siRNA target sequence for Dnajc6 (NM_198412.1,1183-1201).
gtgaccaacacacagatat

SEQ ID NO: 812991 - DNA, 19 bp, Mus musculus
  siRNA target sequence for Dnajc6 (NM_198412.1,1231-1249).
ccactggacacgacagttt

SEQ ID NO: 812992 - DNA, 19 bp, Mus musculus
  siRNA target sequence for Dnajc6 (NM_198412.1,1232-1250).
cactggacacgacagtttt

SEQ ID NO: 812993 - DNA, 19 bp, Mus musculus
  siRNA target sequence for Dnajc6 (NM_198412.1,1234-1252).
ctggacacgacagttttaa

SEQ ID NO: 812994 - DNA, 19 bp, Mus musculus
  siRNA target sequence for Dnajc6 (NM_198412.1,1237-1255).
gacacgacagttttaaagt

SEQ ID NO: 812995 - DNA, 19 bp, Mus musculus
  siRNA target sequence for Dnajc6 (NM_198412.1,1269-1287).
gctggatgcatgtgatgta

SEQ ID NO: 812996 - DNA, 19 bp, Mus musculus
  siRNA target sequence for Dnajc6 (NM_198412.1,1311-1329).
ccaagtgacactggatata

SEQ ID NO: 812997 - DNA, 19 bp, Mus musculus
  siRNA target sequence for Dnajc6 (NM_198412.1,1345-1363).
gacaaagtgatcgacttaa

SEQ ID NO: 812998 - DNA, 19 bp, Mus musculus
  siRNA target sequence for Dnajc6 (NM_198412.1,1364-1382).
ctccaccatgggaacacta

SEQ ID NO: 812999 - DNA, 19 bp, Mus musculus
  siRNA target sequence for Dnajc6 (NM_198412.1,1523-1541).
ctctctgttggcaagatca

SEQ ID NO: 813000 - DNA, 19 bp, Mus musculus
  siRNA target sequence for Dnajc6 (NM_198412.1,1643-1661).
gcaatgcagagggtgataa

SEQ ID NO: 813001 - DNA, 19 bp, Mus musculus
  siRNA target sequence for Dnajc6 (NM_198412.1,1756-1774).
gatgtgagcacgaacttct

SEQ ID NO: 813002 - DNA, 19 bp, Mus musculus
  siRNA target sequence for Dnajc6 (NM_198412.1,1759-1777).
gtgagcacgaacttctctt

SEQ ID NO: 813003 - DNA, 19 bp, Mus musculus
  siRNA target sequence for Dnajc6 (NM_198412.1,1946-1964).
catcgccaaccctaagagt

SEQ ID NO: 813004 - DNA, 19 bp, Mus musculus
  siRNA target sequence for Dnajc6 (NM_198412.1,2008-2026).
ccaccaggtcaggatttgt

SEQ ID NO: 813005 - DNA, 19 bp, Mus musculus
  siRNA target sequence for Dnajc6 (NM_198412.1,2028-2046).
gggctcctttctaaacaca

SEQ ID NO: 813006 - DNA, 19 bp, Mus musculus
  siRNA target sequence for Dnajc6 (NM_198412.1,2029-2047).
ggctcctttctaaacacat

SEQ ID NO: 813007 - DNA, 19 bp, Mus musculus
  siRNA target sequence for Dnajc6 (NM_198412.1,2214-2232).
cccgacaggctcatcacat

SEQ ID NO: 813008 - DNA, 19 bp, Mus musculus
  siRNA target sequence for Dnajc6 (NM_198412.1,2477-2495).
ctcagaaccgacccaatta

SEQ ID NO: 813009 - DNA, 19 bp, Mus musculus
  siRNA target sequence for Dnajc6 (NM_198412.1,2479-2497).
cagaaccgacccaattaca

SEQ ID NO: 813010 - DNA, 19 bp, Mus musculus
  siRNA target sequence for Dnajc6 (NM_198412.1,2529-2547).
gagcgaacgtggaaaagga

SEQ ID NO: 813011 - DNA, 19 bp, Mus musculus
  siRNA target sequence for Dnajc6 (NM_198412.1,2536-2554).
cgtggaaaaggatctacta

SEQ ID NO: 813012 - DNA, 19 bp, Mus musculus
  siRNA target sequence for Dnajc6 (NM_198412.1,2537-2555).
gtggaaaaggatctactaa

SEQ ID NO: 813013 - DNA, 19 bp, Mus musculus
  siRNA target sequence for Dnajc6 (NM_198412.1,2539-2557).
ggaaaaggatctactaact

SEQ ID NO: 813014 - DNA, 19 bp, Mus musculus
  siRNA target sequence for Dnajc6 (NM_198412.1,2540-2558).
gaaaaggatctactaactt

SEQ ID NO: 813015 - DNA, 19 bp, Mus musculus
  siRNA target sequence for Dnajc6 (NM_198412.1,2887-2905).
gggcaaccctatgaacaat

SEQ ID NO: 813016 - DNA, 19 bp, Mus musculus
  siRNA target sequence for Dnajc6 (NM_198412.1,2888-2906).
ggcaaccctatgaacaata

SEQ ID NO: 813017 - DNA, 19 bp, Mus musculus
  siRNA target sequence for Dnajc6 (NM_198412.1,2899-2917).
gaacaatacgcaaagatga

SEQ ID NO: 813018 - DNA, 19 bp, Mus musculus
  siRNA target sequence for Dnajc6 (NM_198412.1,2902-2920).
caatacgcaaagatgattt

SEQ ID NO: 813019 - DNA, 19 bp, Mus musculus
  siRNA target sequence for 1700020G04Rik (NM_198414.1,422-440).
ctgttcctcagtaagttct

SEQ ID NO: 813020 - DNA, 19 bp, Mus musculus
  siRNA target sequence for 1700020G04Rik (NM_198414.1,610-628).
cgcttccatcagctactat

SEQ ID NO: 813021 - DNA, 19 bp, Mus musculus
  siRNA target sequence for 1700020G04Rik (NM_198414.1,639-657).
gcaccgtggcctactacta

SEQ ID NO: 813022 - DNA, 19 bp, Mus musculus
  siRNA target sequence for 1700020G04Rik (NM_198414.1,951-969).
cactcttcgtgcacttcta

SEQ ID NO: 813023 - DNA, 19 bp, Mus musculus
  siRNA target sequence for 1700020G04Rik (NM_198414.1,1038-1056).
cgggtctcttcgacatcat

SEQ ID NO: 813024 - DNA, 19 bp, Mus musculus
  siRNA target sequence for 1700020G04Rik (NM_198414.1,1039-1057).
gggtctcttcgacatcatt

SEQ ID NO: 813025 - DNA, 19 bp, Mus musculus
  siRNA target sequence for 1700020G04Rik (NM_198414.1,1238-1256).
ctgaacagcaccgaattct

SEQ ID NO: 813026 - DNA, 19 bp, Mus musculus
  siRNA target sequence for 1700020G04Rik (NM_198414.1,1248-1266).
ccgaattctgcagtaaaaa

SEQ ID NO: 813027 - DNA, 19 bp, Mus musculus
  siRNA target sequence for Ckmt2 (NM_198415.1,94-112).
gccttctcaaagttgctaa

SEQ ID NO: 813028 - DNA, 19 bp, Mus musculus
  siRNA target sequence for Ckmt2 (NM_198415.1,108-126).
gctaactggccgaaatgca

SEQ ID NO: 813029 - DNA, 19 bp, Mus musculus
  siRNA target sequence for Ckmt2 (NM_198415.1,109-127).
ctaactggccgaaatgcat

SEQ ID NO: 813030 - DNA, 19 bp, Mus musculus
  siRNA target sequence for Ckmt2 (NM_198415.1,250-268).
gaccttcgaaaacataaca

SEQ ID NO: 813031 - DNA, 19 bp, Mus musculus
  siRNA target sequence for Ckmt2 (NM_198415.1,253-271).
cttcgaaaacataacaact

SEQ ID NO: 813032 - DNA, 19 bp, Mus musculus
  siRNA target sequence for Ckmt2 (NM_198415.1,305-323).
ccaaactccgaaacaagat

SEQ ID NO: 813033 - DNA, 19 bp, Mus musculus
  siRNA target sequence for Ckmt2 (NM_198415.1,691-709).
ctggctggccgctactaca

SEQ ID NO: 813034 - DNA, 19 bp, Mus musculus
  siRNA target sequence for Ckmt2 (NM_198415.1,778-796).
gtgtcccctttactaacat

SEQ ID NO: 813035 - DNA, 19 bp, Mus musculus
  siRNA target sequence for Ckmt2 (NM_198415.1,780-798).
gtcccctttactaacatgt

SEQ ID NO: 813036 - DNA, 19 bp, Mus musculus
  siRNA target sequence for Ckmt2 (NM_198415.1,831-849).
gggaatctggcataattat

SEQ ID NO: 813037 - DNA, 19 bp, Mus musculus
  siRNA target sequence for Ckmt2 (NM_198415.1,891-909).
cagggtgatctcaatggaa

SEQ ID NO: 813038 - DNA, 19 bp, Mus musculus
  siRNA target sequence for Ckmt2 (NM_198415.1,918-936).
caatatgaaacgcgtattt

SEQ ID NO: 813039 - DNA, 19 bp, Mus musculus
  siRNA target sequence for Ckmt2 (NM_198415.1,928-946).
cgcgtatttgagagattct

SEQ ID NO: 813040 - DNA, 19 bp, Mus musculus
  siRNA target sequence for Ckmt2 (NM_198415.1,930-948).
cgtatttgagagattctgt

SEQ ID NO: 813041 - DNA, 19 bp, Mus musculus
  siRNA target sequence for Ckmt2 (NM_198415.1,941-959).
gattctgtcgtggactaaa

SEQ ID NO: 813042 - DNA, 19 bp, Mus musculus
  siRNA target sequence for Ckmt2 (NM_198415.1,945-963).
ctgtcgtggactaaaggaa

SEQ ID NO: 813043 - DNA, 19 bp, Mus musculus
  siRNA target sequence for Ckmt2 (NM_198415.1,1012-1030).
cgtctgggatacattttga

SEQ ID NO: 813044 - DNA, 19 bp, Mus musculus
  siRNA target sequence for Ckmt2 (NM_198415.1,1064-1082).
ctggtgtccacgttaggat

SEQ ID NO: 813045 - DNA, 19 bp, Mus musculus
  siRNA target sequence for Ckmt2 (NM_198415.1,1095-1113).
caaggatccacgcttttct

SEQ ID NO: 813046 - DNA, 19 bp, Mus musculus
  siRNA target sequence for Ckmt2 (NM_198415.1,1099-1117).
gatccacgcttttctaaga

SEQ ID NO: 813047 - DNA, 19 bp, Mus musculus
  siRNA target sequence for Ckmt2 (NM_198415.1,1102-1120).
ccacgcttttctaagatct

SEQ ID NO: 813048 - DNA, 19 bp, Mus musculus
  siRNA target sequence for Ckmt2 (NM_198415.1,1103-1121).
cacgcttttctaagatctt

SEQ ID NO: 813049 - DNA, 19 bp, Mus musculus
  siRNA target sequence for Ckmt2 (NM_198415.1,1174-1192).
gtggcagatgtgtacgata

SEQ ID NO: 813050 - DNA, 19 bp, Mus musculus
  siRNA target sequence for Ckmt2 (NM_198415.1,1176-1194).
ggcagatgtgtacgatatt

SEQ ID NO: 813051 - DNA, 19 bp, Mus musculus
  siRNA target sequence for Ckmt2 (NM_198415.1,1180-1198).
gatgtgtacgatatttcca

SEQ ID NO: 813052 - DNA, 19 bp, Mus musculus
  siRNA target sequence for Ckmt2 (NM_198415.1,1185-1203).
gtacgatatttccaacata

SEQ ID NO: 813053 - DNA, 19 bp, Mus musculus
  siRNA target sequence for Ckmt2 (NM_198415.1,1188-1206).
cgatatttccaacatagat

SEQ ID NO: 813054 - DNA, 19 bp, Mus musculus
  siRNA target sequence for Ckmt2 (NM_198415.1,1228-1246).
gagcttgttcagattgtta

SEQ ID NO: 813055 - DNA, 19 bp, Mus musculus
  siRNA target sequence for 3110065C23Rik (NM_198416.1,402-420).
ggctgcttcccgatctact

SEQ ID NO: 813056 - DNA, 19 bp, Mus musculus
  siRNA target sequence for 3110065C23Rik (NM_198416.1,411-429).
ccgatctactcgtgttaca

SEQ ID NO: 813057 - DNA, 19 bp, Mus musculus
  siRNA target sequence for 3110065C23Rik (NM_198416.1,412-430).
cgatctactcgtgttacaa

SEQ ID NO: 813058 - DNA, 19 bp, Mus musculus
  siRNA target sequence for 3110065C23Rik (NM_198416.1,431-449).
gatcaacagtggggttaaa

SEQ ID NO: 813059 - DNA, 19 bp, Mus musculus
  siRNA target sequence for 3110065C23Rik (NM_198416.1,464-482).
ctttttgtggtagaacttt

SEQ ID NO: 813060 - DNA, 19 bp, Mus musculus
  siRNA target sequence for 3110065C23Rik (NM_198416.1,495-513).
cattgctcacccagaagaa

SEQ ID NO: 813061 - DNA, 19 bp, Mus musculus
  siRNA target sequence for 3110065C23Rik (NM_198416.1,499-517).
gctcacccagaagaaatct

SEQ ID NO: 813062 - DNA, 19 bp, Mus musculus
  siRNA target sequence for 3110065C23Rik (NM_198416.1,516-534).
ctcttctcattctcaagta

SEQ ID NO: 813063 - DNA, 19 bp, Mus musculus
  siRNA target sequence for 3110065C23Rik (NM_198416.1,867-885).
ctttcaaggggctaaacga

SEQ ID NO: 813064 - DNA, 19 bp, Mus musculus
  siRNA target sequence for 3110065C23Rik (NM_198416.1,883-901).
cgagcttgtcgatgtctta

SEQ ID NO: 813065 - DNA, 19 bp, Mus musculus
  siRNA target sequence for 3110065C23Rik (NM_198416.1,884-902).
gagcttgtcgatgtcttat

SEQ ID NO: 813066 - DNA, 19 bp, Mus musculus
  siRNA target sequence for 3110065C23Rik (NM_198416.1,890-908).
gtcgatgtcttatattgga

SEQ ID NO: 813067 - DNA, 19 bp, Mus musculus
  siRNA target sequence for 3110065C23Rik (NM_198416.1,928-946).
gttaaaaaggtgaatgtca

SEQ ID NO: 813068 - DNA, 19 bp, Mus musculus
  siRNA target sequence for 3110065C23Rik (NM_198416.1,951-969).
ggaagggccacttaatgct

SEQ ID NO: 813069 - DNA, 19 bp, Mus musculus
  siRNA target sequence for 3110065C23Rik (NM_198416.1,970-988).
gcagtagtagaagaaatca

SEQ ID NO: 813070 - DNA, 19 bp, Mus musculus
  siRNA target sequence for 3110065C23Rik (NM_198416.1,982-1000).
gaaatcacaggctatttga

SEQ ID NO: 813071 - DNA, 19 bp, Mus musculus
  siRNA target sequence for 3110065C23Rik (NM_198416.1,1054-1072).
cagcctgacgggaacacta

SEQ ID NO: 813072 - DNA, 19 bp, Mus musculus
  siRNA target sequence for 3110065C23Rik (NM_198416.1,1056-1074).
gcctgacgggaacactaaa

SEQ ID NO: 813073 - DNA, 19 bp, Mus musculus
  siRNA target sequence for 3110065C23Rik (NM_198416.1,1060-1078).
gacgggaacactaaacaaa

SEQ ID NO: 813074 - DNA, 19 bp, Mus musculus
  siRNA target sequence for 3110065C23Rik (NM_198416.1,1062-1080).
cgggaacactaaacaaaat

SEQ ID NO: 813075 - DNA, 19 bp, Mus musculus
  siRNA target sequence for 3110065C23Rik (NM_198416.1,1063-1081).
gggaacactaaacaaaata

SEQ ID NO: 813076 - DNA, 19 bp, Mus musculus
  siRNA target sequence for 3110065C23Rik (NM_198416.1,1167-1185).
gaaggaggacagttgtata

SEQ ID NO: 813077 - DNA, 19 bp, Mus musculus
  siRNA target sequence for 3110065C23Rik (NM_198416.1,1178-1196).
gttgtatagaccatttcgt

SEQ ID NO: 813078 - DNA, 19 bp, Mus musculus
  siRNA target sequence for 3110065C23Rik (NM_198416.1,1211-1229).
ctgatgtgcaggtcaagtt

SEQ ID NO: 813079 - DNA, 19 bp, Mus musculus
  siRNA target sequence for 3110065C23Rik (NM_198416.1,1227-1245).
gttggaggaccacaaacta

SEQ ID NO: 813080 - DNA, 19 bp, Mus musculus
  siRNA target sequence for 3110065C23Rik (NM_198416.1,1230-1248).
ggaggaccacaaactagta

SEQ ID NO: 813081 - DNA, 19 bp, Mus musculus
  siRNA target sequence for 3110065C23Rik (NM_198416.1,1231-1249).
gaggaccacaaactagtaa

SEQ ID NO: 813082 - DNA, 19 bp, Mus musculus
  siRNA target sequence for 3110065C23Rik (NM_198416.1,1262-1280).
ctgtggaacgacgaaatca

SEQ ID NO: 813083 - DNA, 19 bp, Mus musculus
  siRNA target sequence for 3110065C23Rik (NM_198416.1,1315-1333).
gaaattcagtcatccttaa

SEQ ID NO: 813084 - DNA, 19 bp, Mus musculus
  siRNA target sequence for 3110065C23Rik (NM_198416.1,1480-1498).
gtttcagctcagatgacat

SEQ ID NO: 813085 - DNA, 19 bp, Mus musculus
  siRNA target sequence for 3110065C23Rik (NM_198416.1,1522-1540).
cggtacaccctgagaactt

SEQ ID NO: 813086 - DNA, 19 bp, Mus musculus
  siRNA target sequence for 3110065C23Rik (NM_198416.1,1562-1580).
ccagaagtagtcctactaa

SEQ ID NO: 813087 - DNA, 19 bp, Mus musculus
  siRNA target sequence for 3110065C23Rik (NM_198416.1,1643-1661).
caaacacgaccgttagtga

SEQ ID NO: 813088 - DNA, 19 bp, Mus musculus
  siRNA target sequence for 3110065C23Rik (NM_198416.1,1647-1665).
cacgaccgttagtgatcat

SEQ ID NO: 813089 - DNA, 19 bp, Mus musculus
  siRNA target sequence for 3110065C23Rik (NM_198416.1,1649-1667).
cgaccgttagtgatcatgt

SEQ ID NO: 813090 - DNA, 19 bp, Mus musculus
  siRNA target sequence for 3110065C23Rik (NM_198416.1,1705-1723).
gatggaaaggttctatgtt

SEQ ID NO: 813091 - DNA, 19 bp, Mus musculus
  siRNA target sequence for 3110065C23Rik (NM_198416.1,1721-1739).
gttgtgactctgaaaacta

SEQ ID NO: 813092 - DNA, 19 bp, Mus musculus
  siRNA target sequence for 3110065C23Rik (NM_198416.1,1726-1744).
gactctgaaaactatggaa

SEQ ID NO: 813093 - DNA, 19 bp, Mus musculus
  siRNA target sequence for 3110065C23Rik (NM_198416.1,1742-1760).
gaagtgaaggactaagtaa

SEQ ID NO: 813094 - DNA, 19 bp, Mus musculus
  siRNA target sequence for 3110065C23Rik (NM_198416.1,1894-1912).
cacaacaaagattatcaga

SEQ ID NO: 813095 - DNA, 19 bp, Mus musculus
  siRNA target sequence for 3110065C23Rik (NM_198416.1,2146-2164).
caccgcaaaagacatacta

SEQ ID NO: 813096 - DNA, 19 bp, Mus musculus
  siRNA target sequence for C030039L03Rik (NM_198417.1,528-546).
gaatcatatgtctgatgta

SEQ ID NO: 813097 - DNA, 19 bp, Mus musculus
  siRNA target sequence for C030039L03Rik (NM_198417.1,563-581).
gcataaggcaattcagtaa

SEQ ID NO: 813098 - DNA, 19 bp, Mus musculus
  siRNA target sequence for C030039L03Rik (NM_198417.1,569-587).
ggcaattcagtaaaacttt

SEQ ID NO: 813099 - DNA, 19 bp, Mus musculus
  siRNA target sequence for C030039L03Rik (NM_198417.1,589-607).
gaccttaaagagtctactt

SEQ ID NO: 813100 - DNA, 19 bp, Mus musculus
  siRNA target sequence for C030039L03Rik (NM_198417.1,613-631).
gatggccccagctgtagta

SEQ ID NO: 813101 - DNA, 19 bp, Mus musculus
  siRNA target sequence for C030039L03Rik (NM_198417.1,620-638).
ccagctgtagtacattcaa

SEQ ID NO: 813102 - DNA, 19 bp, Mus musculus
  siRNA target sequence for C030039L03Rik (NM_198417.1,621-639).
cagctgtagtacattcaaa

SEQ ID NO: 813103 - DNA, 19 bp, Mus musculus
  siRNA target sequence for C030039L03Rik (NM_198417.1,664-682).
gctgatgaaagggttacta

SEQ ID NO: 813104 - DNA, 19 bp, Mus musculus
  siRNA target sequence for C030039L03Rik (NM_198417.1,665-683).
ctgatgaaagggttactaa

SEQ ID NO: 813105 - DNA, 19 bp, Mus musculus
  siRNA target sequence for C030039L03Rik (NM_198417.1,667-685).
gatgaaagggttactaaga

SEQ ID NO: 813106 - DNA, 19 bp, Mus musculus
  siRNA target sequence for C030039L03Rik (NM_198417.1,947-965).
ccgacctgctgaaatatca

SEQ ID NO: 813107 - DNA, 19 bp, Mus musculus
  siRNA target sequence for C030039L03Rik (NM_198417.1,948-966).
cgacctgctgaaatatcat

SEQ ID NO: 813108 - DNA, 19 bp, Mus musculus
  siRNA target sequence for C030039L03Rik (NM_198417.1,949-967).
gacctgctgaaatatcata

SEQ ID NO: 813109 - DNA, 19 bp, Mus musculus
  siRNA target sequence for C030039L03Rik (NM_198417.1,1962-1980).
cacacgacaccacactatt

SEQ ID NO: 813110 - DNA, 19 bp, Mus musculus
  siRNA target sequence for C030039L03Rik (NM_198417.1,1964-1982).
cacgacaccacactattca

SEQ ID NO: 813111 - DNA, 19 bp, Mus musculus
  siRNA target sequence for C030039L03Rik (NM_198417.1,1966-1984).
cgacaccacactattcata

SEQ ID NO: 813112 - DNA, 19 bp, Mus musculus
  siRNA target sequence for C030039L03Rik (NM_198417.1,2116-2134).
cgtggtacagctcttagaa

SEQ ID NO: 813113 - DNA, 19 bp, Mus musculus
  siRNA target sequence for Tdrd6 (NM_198418.1,485-503).
cagggcgtagcgagttctt

SEQ ID NO: 813114 - DNA, 19 bp, Mus musculus
  siRNA target sequence for Tdrd6 (NM_198418.1,647-665).
gacgggtcctggatgtgtt

SEQ ID NO: 813115 - DNA, 19 bp, Mus musculus
  siRNA target sequence for Tdrd6 (NM_198418.1,850-868).
cctgggttggattactttt

SEQ ID NO: 813116 - DNA, 19 bp, Mus musculus
  siRNA target sequence for Tdrd6 (NM_198418.1,901-919).
gtggtagtaacccaagtat

SEQ ID NO: 813117 - DNA, 19 bp, Mus musculus
  siRNA target sequence for Tdrd6 (NM_198418.1,1176-1194).
cgtcgattacggaaggaaa

SEQ ID NO: 813118 - DNA, 19 bp, Mus musculus
  siRNA target sequence for Tdrd6 (NM_198418.1,1185-1203).
cggaaggaaagaactagta

SEQ ID NO: 813119 - DNA, 19 bp, Mus musculus
  siRNA target sequence for Tdrd6 (NM_198418.1,1186-1204).
ggaaggaaagaactagtaa

SEQ ID NO: 813120 - DNA, 19 bp, Mus musculus
  siRNA target sequence for Tdrd6 (NM_198418.1,1227-1245).
gctgccggagtattttcga

SEQ ID NO: 813121 - DNA, 19 bp, Mus musculus
  siRNA target sequence for Tdrd6 (NM_198418.1,1228-1246).
ctgccggagtattttcgaa

SEQ ID NO: 813122 - DNA, 19 bp, Mus musculus
  siRNA target sequence for Tdrd6 (NM_198418.1,1383-1401).
ctttgagcatatgtattat

SEQ ID NO: 813123 - DNA, 19 bp, Mus musculus
  siRNA target sequence for Tdrd6 (NM_198418.1,1437-1455).
cagtgcattcggagtacaa

SEQ ID NO: 813124 - DNA, 19 bp, Mus musculus
  siRNA target sequence for Tdrd6 (NM_198418.1,1528-1546).
gtggaggcagcgtttcagt

SEQ ID NO: 813125 - DNA, 19 bp, Mus musculus
  siRNA target sequence for Tdrd6 (NM_198418.1,1564-1582).
gaaatggaggcggaagttt

SEQ ID NO: 813126 - DNA, 19 bp, Mus musculus
  siRNA target sequence for Tdrd6 (NM_198418.1,1611-1629).
gaagatgaacaccttctat

SEQ ID NO: 813127 - DNA, 19 bp, Mus musculus
  siRNA target sequence for Tdrd6 (NM_198418.1,1716-1734).
gagaatgtgcagtttctat

SEQ ID NO: 813128 - DNA, 19 bp, Mus musculus
  siRNA target sequence for Tdrd6 (NM_198418.1,1752-1770).
ggatggggttattttgaga

SEQ ID NO: 813129 - DNA, 19 bp, Mus musculus
  siRNA target sequence for Tdrd6 (NM_198418.1,1826-1844).
ccacggtcacccgattaga

SEQ ID NO: 813130 - DNA, 19 bp, Mus musculus
  siRNA target sequence for Tdrd6 (NM_198418.1,1904-1922).
gtgatgtgagaatgttgtt

SEQ ID NO: 813131 - DNA, 19 bp, Mus musculus
  siRNA target sequence for Tdrd6 (NM_198418.1,2004-2022).
ggaagccacctcatttttt

SEQ ID NO: 813132 - DNA, 19 bp, Mus musculus
  siRNA target sequence for Tdrd6 (NM_198418.1,2028-2046).
gacggtactccacaaagaa

SEQ ID NO: 813133 - DNA, 19 bp, Mus musculus
  siRNA target sequence for Tdrd6 (NM_198418.1,2030-2048).
cggtactccacaaagaatt

SEQ ID NO: 813134 - DNA, 19 bp, Mus musculus
  siRNA target sequence for Tdrd6 (NM_198418.1,2071-2089).
caggatcaccaatatgtca

SEQ ID NO: 813135 - DNA, 19 bp, Mus musculus
  siRNA target sequence for Tdrd6 (NM_198418.1,2073-2091).
ggatcaccaatatgtcata

SEQ ID NO: 813136 - DNA, 19 bp, Mus musculus
  siRNA target sequence for Tdrd6 (NM_198418.1,2077-2095).
caccaatatgtcatagaga

SEQ ID NO: 813137 - DNA, 19 bp, Mus musculus
  siRNA target sequence for Tdrd6 (NM_198418.1,2111-2129).
gaatgggggaggaaaacat

SEQ ID NO: 813138 - DNA, 19 bp, Mus musculus
  siRNA target sequence for Tdrd6 (NM_198418.1,2117-2135).
gggaggaaaacattagtaa

SEQ ID NO: 813139 - DNA, 19 bp, Mus musculus
  siRNA target sequence for Tdrd6 (NM_198418.1,2206-2224).
cattcccctgggcatgttt

SEQ ID NO: 813140 - DNA, 19 bp, Mus musculus
  siRNA target sequence for Tdrd6 (NM_198418.1,2216-2234).
ggcatgtttctggtcattt

SEQ ID NO: 813141 - DNA, 19 bp, Mus musculus
  siRNA target sequence for Tdrd6 (NM_198418.1,2238-2256).
ggcggagcctagcaaaata

SEQ ID NO: 813142 - DNA, 19 bp, Mus musculus
  siRNA target sequence for Tdrd6 (NM_198418.1,2239-2257).
gcggagcctagcaaaataa

SEQ ID NO: 813143 - DNA, 19 bp, Mus musculus
  siRNA target sequence for Tdrd6 (NM_198418.1,2284-2302).
cagagagccaaaaaagata

SEQ ID NO: 813144 - DNA, 19 bp, Mus musculus
  siRNA target sequence for Tdrd6 (NM_198418.1,2335-2353).
gacacggtcagcctttcaa

SEQ ID NO: 813145 - DNA, 19 bp, Mus musculus
  siRNA target sequence for Tdrd6 (NM_198418.1,2341-2359).
gtcagcctttcaaaccttt

SEQ ID NO: 813146 - DNA, 19 bp, Mus musculus
  siRNA target sequence for Tdrd6 (NM_198418.1,2399-2417).
ctctcctcatgctgaactt

SEQ ID NO: 813147 - DNA, 19 bp, Mus musculus
  siRNA target sequence for Tdrd6 (NM_198418.1,2404-2422).
ctcatgctgaacttcttga

SEQ ID NO: 813148 - DNA, 19 bp, Mus musculus
  siRNA target sequence for Tdrd6 (NM_198418.1,2465-2483).
gcagcaccgttgaagtcaa

SEQ ID NO: 813149 - DNA, 19 bp, Mus musculus
  siRNA target sequence for Tdrd6 (NM_198418.1,2563-2581).
gacatcgaggactattgca

SEQ ID NO: 813150 - DNA, 19 bp, Mus musculus
  siRNA target sequence for Tdrd6 (NM_198418.1,2565-2583).
catcgaggactattgcaaa

SEQ ID NO: 813151 - DNA, 19 bp, Mus musculus
  siRNA target sequence for Tdrd6 (NM_198418.1,2569-2587).
gaggactattgcaaaagca

SEQ ID NO: 813152 - DNA, 19 bp, Mus musculus
  siRNA target sequence for Tdrd6 (NM_198418.1,2684-2702).
cgttagagcatgttagagt

SEQ ID NO: 813153 - DNA, 19 bp, Mus musculus
  siRNA target sequence for Tdrd6 (NM_198418.1,2699-2717).
gagtggtgttcgtggatta

SEQ ID NO: 813154 - DNA, 19 bp, Mus musculus
  siRNA target sequence for Tdrd6 (NM_198418.1,2703-2721).
ggtgttcgtggattatgga

SEQ ID NO: 813155 - DNA, 19 bp, Mus musculus
  siRNA target sequence for Tdrd6 (NM_198418.1,2722-2740).
gacagggacgtggtatcta

SEQ ID NO: 813156 - DNA, 19 bp, Mus musculus
  siRNA target sequence for Tdrd6 (NM_198418.1,2793-2811).
cttccggtgcagtctttat

SEQ ID NO: 813157 - DNA, 19 bp, Mus musculus
  siRNA target sequence for Tdrd6 (NM_198418.1,2796-2814).
ccggtgcagtctttataat

SEQ ID NO: 813158 - DNA, 19 bp, Mus musculus
  siRNA target sequence for Tdrd6 (NM_198418.1,2830-2848).
ggtgaaaatccctttgtct

SEQ ID NO: 813159 - DNA, 19 bp, Mus musculus
  siRNA target sequence for Tdrd6 (NM_198418.1,2887-2905).
gatagcgctcggcagaata

SEQ ID NO: 813160 - DNA, 19 bp, Mus musculus
  siRNA target sequence for Tdrd6 (NM_198418.1,2891-2909).
gcgctcggcagaataactt

SEQ ID NO: 813161 - DNA, 19 bp, Mus musculus
  siRNA target sequence for Tdrd6 (NM_198418.1,2892-2910).
cgctcggcagaataactta

SEQ ID NO: 813162 - DNA, 19 bp, Mus musculus
  siRNA target sequence for Tdrd6 (NM_198418.1,2894-2912).
ctcggcagaataacttaga

SEQ ID NO: 813163 - DNA, 19 bp, Mus musculus
  siRNA target sequence for Tdrd6 (NM_198418.1,2896-2914).
cggcagaataacttagaat

SEQ ID NO: 813164 - DNA, 19 bp, Mus musculus
  siRNA target sequence for Tdrd6 (NM_198418.1,2897-2915).
ggcagaataacttagaatt

SEQ ID NO: 813165 - DNA, 19 bp, Mus musculus
  siRNA target sequence for Tdrd6 (NM_198418.1,2898-2916).
gcagaataacttagaatta

SEQ ID NO: 813166 - DNA, 19 bp, Mus musculus
  siRNA target sequence for Tdrd6 (NM_198418.1,2952-2970).
ggaagagtggttcaatgtt

SEQ ID NO: 813167 - DNA, 19 bp, Mus musculus
  siRNA target sequence for Tdrd6 (NM_198418.1,2996-3014).
gcgcctgccgttttttggt

SEQ ID NO: 813168 - DNA, 19 bp, Mus musculus
  siRNA target sequence for Tdrd6 (NM_198418.1,2997-3015).
cgcctgccgttttttggta

SEQ ID NO: 813169 - DNA, 19 bp, Mus musculus
  siRNA target sequence for Tdrd6 (NM_198418.1,3002-3020).
gccgttttttggtagaaaa

SEQ ID NO: 813170 - DNA, 19 bp, Mus musculus
  siRNA target sequence for Tdrd6 (NM_198418.1,3029-3047).
cgaggcctgtcaaacatca

SEQ ID NO: 813171 - DNA, 19 bp, Mus musculus
  siRNA target sequence for Tdrd6 (NM_198418.1,3067-3085).
gttcagctacactcttact

SEQ ID NO: 813172 - DNA, 19 bp, Mus musculus
  siRNA target sequence for Tdrd6 (NM_198418.1,3070-3088).
cagctacactcttactact

SEQ ID NO: 813173 - DNA, 19 bp, Mus musculus
  siRNA target sequence for Tdrd6 (NM_198418.1,3072-3090).
gctacactcttactactat

SEQ ID NO: 813174 - DNA, 19 bp, Mus musculus
  siRNA target sequence for Tdrd6 (NM_198418.1,3073-3091).
ctacactcttactactatt

SEQ ID NO: 813175 - DNA, 19 bp, Mus musculus
  siRNA target sequence for Tdrd6 (NM_198418.1,3092-3110).
ccacccatgacctaaaaat

SEQ ID NO: 813176 - DNA, 19 bp, Mus musculus
  siRNA target sequence for Tdrd6 (NM_198418.1,3102-3120).
cctaaaaatcggaagtgaa

SEQ ID NO: 813177 - DNA, 19 bp, Mus musculus
  siRNA target sequence for Tdrd6 (NM_198418.1,3144-3162).
cgacgacccctggacattt

SEQ ID NO: 813178 - DNA, 19 bp, Mus musculus
  siRNA target sequence for Tdrd6 (NM_198418.1,3147-3165).
cgacccctggacattttat

SEQ ID NO: 813179 - DNA, 19 bp, Mus musculus
  siRNA target sequence for Tdrd6 (NM_198418.1,3196-3214).
gaacaactgtcgtacaaca

SEQ ID NO: 813180 - DNA, 19 bp, Mus musculus
  siRNA target sequence for Tdrd6 (NM_198418.1,3199-3217).
caactgtcgtacaacatca

SEQ ID NO: 813181 - DNA, 19 bp, Mus musculus
  siRNA target sequence for Tdrd6 (NM_198418.1,3223-3241).
ctaagtaaagccttactga

SEQ ID NO: 813182 - DNA, 19 bp, Mus musculus
  siRNA target sequence for Tdrd6 (NM_198418.1,3273-3291).
cttgtgccttgccagatat

SEQ ID NO: 813183 - DNA, 19 bp, Mus musculus
  siRNA target sequence for Tdrd6 (NM_198418.1,3303-3321).
ctggtatagaggaataata

SEQ ID NO: 813184 - DNA, 19 bp, Mus musculus
  siRNA target sequence for Tdrd6 (NM_198418.1,3306-3324).
gtatagaggaataataata

SEQ ID NO: 813185 - DNA, 19 bp, Mus musculus
  siRNA target sequence for Tdrd6 (NM_198418.1,3331-3349).
gagccaagtaaggtctttt

SEQ ID NO: 813186 - DNA, 19 bp, Mus musculus
  siRNA target sequence for Tdrd6 (NM_198418.1,3439-3457).
gccttgaaatgctccttat

SEQ ID NO: 813187 - DNA, 19 bp, Mus musculus
  siRNA target sequence for Tdrd6 (NM_198418.1,3458-3476).
cggacatccctcatcacat

SEQ ID NO: 813188 - DNA, 19 bp, Mus musculus
  siRNA target sequence for Tdrd6 (NM_198418.1,3502-3520).
caggaaactgttttagata

SEQ ID NO: 813189 - DNA, 19 bp, Mus musculus
  siRNA target sequence for Tdrd6 (NM_198418.1,3524-3542).
cactgaaggctttagttgt

SEQ ID NO: 813190 - DNA, 19 bp, Mus musculus
  siRNA target sequence for Tdrd6 (NM_198418.1,3583-3601).
gacgacagtgtccaaatca

SEQ ID NO: 813191 - DNA, 19 bp, Mus musculus
  siRNA target sequence for Tdrd6 (NM_198418.1,3624-3642).
cgggctccttggttacaaa

SEQ ID NO: 813192 - DNA, 19 bp, Mus musculus
  siRNA target sequence for Tdrd6 (NM_198418.1,3625-3643).
gggctccttggttacaaaa

SEQ ID NO: 813193 - DNA, 19 bp, Mus musculus
  siRNA target sequence for Tdrd6 (NM_198418.1,3626-3644).
ggctccttggttacaaaaa

SEQ ID NO: 813194 - DNA, 19 bp, Mus musculus
  siRNA target sequence for Tdrd6 (NM_198418.1,3693-3711).
caaagctcttgaagataaa

SEQ ID NO: 813195 - DNA, 19 bp, Mus musculus
  siRNA target sequence for Tdrd6 (NM_198418.1,3728-3746).
catcacttgcagactatct

SEQ ID NO: 813196 - DNA, 19 bp, Mus musculus
  siRNA target sequence for Tdrd6 (NM_198418.1,3781-3799).
gagattatgggtgaatctt

SEQ ID NO: 813197 - DNA, 19 bp, Mus musculus
  siRNA target sequence for Tdrd6 (NM_198418.1,3821-3839).
catgtaaggagctcagata

SEQ ID NO: 813198 - DNA, 19 bp, Mus musculus
  siRNA target sequence for Tdrd6 (NM_198418.1,3904-3922).
gatggagggtttccattaa

SEQ ID NO: 813199 - DNA, 19 bp, Mus musculus
  siRNA target sequence for Tdrd6 (NM_198418.1,3960-3978).
catgagtggcaccaaacta

SEQ ID NO: 813200 - DNA, 19 bp, Mus musculus
  siRNA target sequence for Tdrd6 (NM_198418.1,4050-4068).
cccacaaaagacaatagct

SEQ ID NO: 813201 - DNA, 19 bp, Mus musculus
  siRNA target sequence for Tdrd6 (NM_198418.1,4125-4143).
catccagctgatagaagat

SEQ ID NO: 813202 - DNA, 19 bp, Mus musculus
  siRNA target sequence for Tdrd6 (NM_198418.1,4141-4159).
gatgaagctgagatcaaca

SEQ ID NO: 813203 - DNA, 19 bp, Mus musculus
  siRNA target sequence for Tdrd6 (NM_198418.1,4220-4238).
ggcagagcggagatgtgat

SEQ ID NO: 813204 - DNA, 19 bp, Mus musculus
  siRNA target sequence for Tdrd6 (NM_198418.1,4221-4239).
gcagagcggagatgtgata

SEQ ID NO: 813205 - DNA, 19 bp, Mus musculus
  siRNA target sequence for Tdrd6 (NM_198418.1,4222-4240).
cagagcggagatgtgatat

SEQ ID NO: 813206 - DNA, 19 bp, Mus musculus
  siRNA target sequence for Tdrd6 (NM_198418.1,4246-4264).
gttttcccagaggataact

SEQ ID NO: 813207 - DNA, 19 bp, Mus musculus
  siRNA target sequence for Tdrd6 (NM_198418.1,4311-4329).
ctctgtccagtttatcgat

SEQ ID NO: 813208 - DNA, 19 bp, Mus musculus
  siRNA target sequence for Tdrd6 (NM_198418.1,4313-4331).
ctgtccagtttatcgatta

SEQ ID NO: 813209 - DNA, 19 bp, Mus musculus
  siRNA target sequence for Tdrd6 (NM_198418.1,4445-4463).
gtaaggaaatggtaagcta

SEQ ID NO: 813210 - DNA, 19 bp, Mus musculus
  siRNA target sequence for Tdrd6 (NM_198418.1,4449-4467).
ggaaatggtaagctacttt

SEQ ID NO: 813211 - DNA, 19 bp, Mus musculus
  siRNA target sequence for Tdrd6 (NM_198418.1,4450-4468).
gaaatggtaagctactttt

SEQ ID NO: 813212 - DNA, 19 bp, Mus musculus
  siRNA target sequence for Tdrd6 (NM_198418.1,4476-4494).
gacagacgaggctcagata

SEQ ID NO: 813213 - DNA, 19 bp, Mus musculus
  siRNA target sequence for Tdrd6 (NM_198418.1,4480-4498).
gacgaggctcagataagat

SEQ ID NO: 813214 - DNA, 19 bp, Mus musculus
  siRNA target sequence for Tdrd6 (NM_198418.1,4482-4500).
cgaggctcagataagatgt

SEQ ID NO: 813215 - DNA, 19 bp, Mus musculus
  siRNA target sequence for Tdrd6 (NM_198418.1,4486-4504).
gctcagataagatgtgaat

SEQ ID NO: 813216 - DNA, 19 bp, Mus musculus
  siRNA target sequence for Tdrd6 (NM_198418.1,4487-4505).
ctcagataagatgtgaatt

SEQ ID NO: 813217 - DNA, 19 bp, Mus musculus
  siRNA target sequence for Tdrd6 (NM_198418.1,4557-4575).
catagctgaagatatgatt

SEQ ID NO: 813218 - DNA, 19 bp, Mus musculus
  siRNA target sequence for Tdrd6 (NM_198418.1,4580-4598).
ggtttccatgcaatggaaa

SEQ ID NO: 813219 - DNA, 19 bp, Mus musculus
  siRNA target sequence for Tdrd6 (NM_198418.1,4691-4709).
ggtataaccccaaagcaaa

SEQ ID NO: 813220 - DNA, 19 bp, Mus musculus
  siRNA target sequence for Tdrd6 (NM_198418.1,4741-4759).
gggcctgagtacttttggt

SEQ ID NO: 813221 - DNA, 19 bp, Mus musculus
  siRNA target sequence for Tdrd6 (NM_198418.1,4844-4862).
gcacccaatgtccacaaat

SEQ ID NO: 813222 - DNA, 19 bp, Mus musculus
  siRNA target sequence for Tdrd6 (NM_198418.1,4848-4866).
ccaatgtccacaaattgga

SEQ ID NO: 813223 - DNA, 19 bp, Mus musculus
  siRNA target sequence for Tdrd6 (NM_198418.1,4889-4907).
gagaagacgggcattacta

SEQ ID NO: 813224 - DNA, 19 bp, Mus musculus
  siRNA target sequence for Tdrd6 (NM_198418.1,5031-5049).
ggtccccatgcaagcattt

SEQ ID NO: 813225 - DNA, 19 bp, Mus musculus
  siRNA target sequence for Tdrd6 (NM_198418.1,5034-5052).
ccccatgcaagcatttcca

SEQ ID NO: 813226 - DNA, 19 bp, Mus musculus
  siRNA target sequence for Tdrd6 (NM_198418.1,5035-5053).
cccatgcaagcatttccat

SEQ ID NO: 813227 - DNA, 19 bp, Mus musculus
  siRNA target sequence for Tdrd6 (NM_198418.1,5207-5225).
ggagcaaaggcgagaacat

SEQ ID NO: 813228 - DNA, 19 bp, Mus musculus
  siRNA target sequence for Tdrd6 (NM_198418.1,5210-5228).
gcaaaggcgagaacattaa

SEQ ID NO: 813229 - DNA, 19 bp, Mus musculus
  siRNA target sequence for Tdrd6 (NM_198418.1,5229-5247).
cgagaagatgaagaagtat

SEQ ID NO: 813230 - DNA, 19 bp, Mus musculus
  siRNA target sequence for Tdrd6 (NM_198418.1,5253-5271).
gacgggcgtgcccaagaat

SEQ ID NO: 813231 - DNA, 19 bp, Mus musculus
  siRNA target sequence for Tdrd6 (NM_198418.1,5255-5273).
cgggcgtgcccaagaatga

SEQ ID NO: 813232 - DNA, 19 bp, Mus musculus
  siRNA target sequence for Tdrd6 (NM_198418.1,5340-5358).
gaagccaagtcataaaata

SEQ ID NO: 813233 - DNA, 19 bp, Mus musculus
  siRNA target sequence for Tdrd6 (NM_198418.1,5343-5361).
gccaagtcataaaatagca

SEQ ID NO: 813234 - DNA, 19 bp, Mus musculus
  siRNA target sequence for Tdrd6 (NM_198418.1,5359-5377).
gcacaagataagacattct

SEQ ID NO: 813235 - DNA, 19 bp, Mus musculus
  siRNA target sequence for Tdrd6 (NM_198418.1,5407-5425).
gagagacttgaaaaggatt

SEQ ID NO: 813236 - DNA, 19 bp, Mus musculus
  siRNA target sequence for Tdrd6 (NM_198418.1,5413-5431).
cttgaaaaggatttaaaca

SEQ ID NO: 813237 - DNA, 19 bp, Mus musculus
  siRNA target sequence for Tdrd6 (NM_198418.1,5434-5452).
gaaaccaagacaagtaaat

SEQ ID NO: 813238 - DNA, 19 bp, Mus musculus
  siRNA target sequence for Tdrd6 (NM_198418.1,5442-5460).
gacaagtaaattctatgaa

SEQ ID NO: 813239 - DNA, 19 bp, Mus musculus
  siRNA target sequence for Tdrd6 (NM_198418.1,5465-5483).
gcacccgtagcatcttcaa

SEQ ID NO: 813240 - DNA, 19 bp, Mus musculus
  siRNA target sequence for Tdrd6 (NM_198418.1,5491-5509).
gagaactcatgcaaaggta

SEQ ID NO: 813241 - DNA, 19 bp, Mus musculus
  siRNA target sequence for Tdrd6 (NM_198418.1,5553-5571).
cgtggacagagccaagttt

SEQ ID NO: 813242 - DNA, 19 bp, Mus musculus
  siRNA target sequence for Tdrd6 (NM_198418.1,5563-5581).
gccaagtttgataataact

SEQ ID NO: 813243 - DNA, 19 bp, Mus musculus
  siRNA target sequence for Tdrd6 (NM_198418.1,5591-5609).
cgggatttaacccgatatt

SEQ ID NO: 813244 - DNA, 19 bp, Mus musculus
  siRNA target sequence for Tdrd6 (NM_198418.1,5621-5639).
gtgagccaaaggagttact

SEQ ID NO: 813245 - DNA, 19 bp, Mus musculus
  siRNA target sequence for Tdrd6 (NM_198418.1,5704-5722).
gaactggaatccattgagt

SEQ ID NO: 813246 - DNA, 19 bp, Mus musculus
  siRNA target sequence for Tdrd6 (NM_198418.1,5812-5830).
gccaccctggagtcattca

SEQ ID NO: 813247 - DNA, 19 bp, Mus musculus
  siRNA target sequence for Tdrd6 (NM_198418.1,5908-5926).
gacagcataagccctttat

SEQ ID NO: 813248 - DNA, 19 bp, Mus musculus
  siRNA target sequence for Tdrd6 (NM_198418.1,5910-5928).
cagcataagccctttatct

SEQ ID NO: 813249 - DNA, 19 bp, Mus musculus
  siRNA target sequence for Tdrd6 (NM_198418.1,6039-6057).
cgggaagggtggcaattca

SEQ ID NO: 813250 - DNA, 19 bp, Mus musculus
  siRNA target sequence for Tdrd6 (NM_198418.1,6093-6111).
gtttccgcagtttgaaagt

SEQ ID NO: 813251 - DNA, 19 bp, Mus musculus
  siRNA target sequence for Tdrd6 (NM_198418.1,6225-6243).
cttctctgtcggatcgaaa

SEQ ID NO: 813252 - DNA, 19 bp, Mus musculus
  siRNA target sequence for Tdrd6 (NM_198418.1,6250-6268).
gtgtggtcgagcctaagaa

SEQ ID NO: 813253 - DNA, 19 bp, Mus musculus
  siRNA target sequence for Tdrd6 (NM_198418.1,6275-6293).
ggtctaagtgtgagattct

SEQ ID NO: 813254 - DNA, 19 bp, Mus musculus
  siRNA target sequence for Tdrd6 (NM_198418.1,6352-6370).
gtaagccccgagaatgtct

SEQ ID NO: 813255 - DNA, 19 bp, Mus musculus
  siRNA target sequence for Tdrd6 (NM_198418.1,6376-6394).
gggattcccaaggtagata

SEQ ID NO: 813256 - DNA, 19 bp, Mus musculus
  siRNA target sequence for Tdrd6 (NM_198418.1,6377-6395).
ggattcccaaggtagataa

SEQ ID NO: 813257 - DNA, 19 bp, Mus musculus
  siRNA target sequence for Tdrd6 (NM_198418.1,6398-6416).
gaccttctgaggctgtatt

SEQ ID NO: 813258 - DNA, 19 bp, Mus musculus
  siRNA target sequence for Tdrd6 (NM_198418.1,6457-6475).
gacgccaccaccaaaggtt

SEQ ID NO: 813259 - DNA, 19 bp, Mus musculus
  siRNA target sequence for Tdrd6 (NM_198418.1,6459-6477).
cgccaccaccaaaggtttt

SEQ ID NO: 813260 - DNA, 19 bp, Mus musculus
  siRNA target sequence for Tdrd6 (NM_198418.1,6460-6478).
gccaccaccaaaggttttt

SEQ ID NO: 813261 - DNA, 19 bp, Mus musculus
  siRNA target sequence for Tdrd6 (NM_198418.1,6527-6545).
gcacggccaagctgaacat

SEQ ID NO: 813262 - DNA, 19 bp, Mus musculus
  siRNA target sequence for Tdrd6 (NM_198418.1,6528-6546).
cacggccaagctgaacata

SEQ ID NO: 813263 - DNA, 19 bp, Mus musculus
  siRNA target sequence for Rpel1 (NM_198419.2,361-379).
ccaacctggggaggatttt

SEQ ID NO: 813264 - DNA, 19 bp, Mus musculus
  siRNA target sequence for Rpel1 (NM_198419.2,497-515).
gaaggagatctacgataaa

SEQ ID NO: 813265 - DNA, 19 bp, Mus musculus
  siRNA target sequence for Rpel1 (NM_198419.2,516-534).
gatggagaactctctatat

SEQ ID NO: 813266 - DNA, 19 bp, Mus musculus
  siRNA target sequence for Rpel1 (NM_198419.2,870-888).
cggattgccaaccacttaa

SEQ ID NO: 813267 - DNA, 19 bp, Mus musculus
  siRNA target sequence for Rpel1 (NM_198419.2,872-890).
gattgccaaccacttaaca

SEQ ID NO: 813268 - DNA, 19 bp, Mus musculus
  siRNA target sequence for Rpel1 (NM_198419.2,914-932).
gccttgtctgccagtgaaa

SEQ ID NO: 813269 - DNA, 19 bp, Mus musculus
  siRNA target sequence for Rpel1 (NM_198419.2,916-934).
cttgtctgccagtgaaact

SEQ ID NO: 813270 - DNA, 19 bp, Mus musculus
  siRNA target sequence for Rpel1 (NM_198419.2,940-958).
ctccgctacctccaaagaa

SEQ ID NO: 813271 - DNA, 19 bp, Mus musculus
  siRNA target sequence for Rpel1 (NM_198419.2,943-961).
cgctacctccaaagaaagt

SEQ ID NO: 813272 - DNA, 19 bp, Mus musculus
  siRNA target sequence for Rpel1 (NM_198419.2,1267-1285).
caagcgacggcatcacaaa

SEQ ID NO: 813273 - DNA, 19 bp, Mus musculus
  siRNA target sequence for Rpel1 (NM_198419.2,1295-1313).
catgggccttccggaaata

SEQ ID NO: 813274 - DNA, 19 bp, Mus musculus
  siRNA target sequence for Rpel1 (NM_198419.2,1298-1316).
gggccttccggaaataaga

SEQ ID NO: 813275 - DNA, 19 bp, Mus musculus
  siRNA target sequence for Rpel1 (NM_198419.2,1323-1341).
ccaactgttgtgattgaat

SEQ ID NO: 813276 - DNA, 19 bp, Mus musculus
  siRNA target sequence for Rpel1 (NM_198419.2,1366-1384).
ctcatgaacccgactatga

SEQ ID NO: 813277 - DNA, 19 bp, Mus musculus
  siRNA target sequence for Rpel1 (NM_198419.2,1767-1785).
cgggagaggaagatcctta

SEQ ID NO: 813278 - DNA, 19 bp, Mus musculus
  siRNA target sequence for Rpel1 (NM_198419.2,1768-1786).
gggagaggaagatccttat

SEQ ID NO: 813279 - DNA, 19 bp, Mus musculus
  siRNA target sequence for Rpel1 (NM_198419.2,1882-1900).
ccattcggaaggaactcaa

SEQ ID NO: 813280 - DNA, 19 bp, Mus musculus
  siRNA target sequence for Rpel1 (NM_198419.2,1883-1901).
cattcggaaggaactcaat

SEQ ID NO: 813281 - DNA, 19 bp, Mus musculus
  siRNA target sequence for Rpel1 (NM_198419.2,1887-1905).
cggaaggaactcaatgagt

SEQ ID NO: 813282 - DNA, 19 bp, Mus musculus
  siRNA target sequence for Rpel1 (NM_198419.2,1892-1910).
ggaactcaatgagtttaaa

SEQ ID NO: 813283 - DNA, 19 bp, Mus musculus
  siRNA target sequence for Rpel1 (NM_198419.2,1922-1940).
ggaagtccacgagttaagt

SEQ ID NO: 813284 - DNA, 19 bp, Mus musculus
  siRNA target sequence for Rpel1 (NM_198419.2,1923-1941).
gaagtccacgagttaagta

SEQ ID NO: 813285 - DNA, 19 bp, Mus musculus
  siRNA target sequence for Rpel1 (NM_198419.2,1931-1949).
cgagttaagtagacactta

SEQ ID NO: 813286 - DNA, 19 bp, Mus musculus
  siRNA target sequence for AY424292 (NM_198422.1,237-255).
ccgcctctacacctatgaa

SEQ ID NO: 813287 - DNA, 19 bp, Mus musculus
  siRNA target sequence for AY424292 (NM_198422.1,262-280).
ccggtatccctcaaagaca

SEQ ID NO: 813288 - DNA, 19 bp, Mus musculus
  siRNA target sequence for AY424292 (NM_198422.1,316-334).
ccttccagactgtgtatca

SEQ ID NO: 813289 - DNA, 19 bp, Mus musculus
  siRNA target sequence for AY424292 (NM_198422.1,317-335).
cttccagactgtgtatcaa

SEQ ID NO: 813290 - DNA, 19 bp, Mus musculus
  siRNA target sequence for AY424292 (NM_198422.1,321-339).
cagactgtgtatcaaaagt

SEQ ID NO: 813291 - DNA, 19 bp, Mus musculus
  siRNA target sequence for AY424292 (NM_198422.1,338-356).
gtttgtttatcctgtctaa

SEQ ID NO: 813292 - DNA, 19 bp, Mus musculus
  siRNA target sequence for AY424292 (NM_198422.1,377-395).
gtcatttgctgggtttctt

SEQ ID NO: 813293 - DNA, 19 bp, Mus musculus
  siRNA target sequence for AY424292 (NM_198422.1,412-430).
gggatatatgacatgacat

SEQ ID NO: 813294 - DNA, 19 bp, Mus musculus
  siRNA target sequence for AY424292 (NM_198422.1,449-467).
gcgcatccagagaagactt

SEQ ID NO: 813295 - DNA, 19 bp, Mus musculus
  siRNA target sequence for AY424292 (NM_198422.1,471-489).
gatttgctccatttgtctt

SEQ ID NO: 813296 - DNA, 19 bp, Mus musculus
  siRNA target sequence for AY424292 (NM_198422.1,515-533).
gctcggtgggctatcatct

SEQ ID NO: 813297 - DNA, 19 bp, Mus musculus
  siRNA target sequence for AY424292 (NM_198422.1,516-534).
ctcggtgggctatcatctt

SEQ ID NO: 813298 - DNA, 19 bp, Mus musculus
  siRNA target sequence for AY424292 (NM_198422.1,518-536).
cggtgggctatcatctttt

SEQ ID NO: 813299 - DNA, 19 bp, Mus musculus
  siRNA target sequence for AY424292 (NM_198422.1,544-562).
catcggtcagaaaaaactt

SEQ ID NO: 813300 - DNA, 19 bp, Mus musculus
  siRNA target sequence for AY424292 (NM_198422.1,583-601).
gattatgcaggaatttcta

SEQ ID NO: 813301 - DNA, 19 bp, Mus musculus
  siRNA target sequence for AY424292 (NM_198422.1,617-635).
gctatgtctcaggagtatt

SEQ ID NO: 813302 - DNA, 19 bp, Mus musculus
  siRNA target sequence for AY424292 (NM_198422.1,618-636).
ctatgtctcaggagtattt

SEQ ID NO: 813303 - DNA, 19 bp, Mus musculus
  siRNA target sequence for AY424292 (NM_198422.1,624-642).
ctcaggagtattttatgca

SEQ ID NO: 813304 - DNA, 19 bp, Mus musculus
  siRNA target sequence for AY424292 (NM_198422.1,777-795).
ctctgtttcgggatatgga

SEQ ID NO: 813305 - DNA, 19 bp, Mus musculus
  siRNA target sequence for AY424292 (NM_198422.1,833-851).
gagtcagtgctcctattgt

SEQ ID NO: 813306 - DNA, 19 bp, Mus musculus
  siRNA target sequence for AY424292 (NM_198422.1,858-876).
cttcgcaccccgagtaatt

SEQ ID NO: 813307 - DNA, 19 bp, Mus musculus
  siRNA target sequence for AY424292 (NM_198422.1,862-880).
gcaccccgagtaattgtga

SEQ ID NO: 813308 - DNA, 19 bp, Mus musculus
  siRNA target sequence for AY424292 (NM_198422.1,863-881).
caccccgagtaattgtgat

SEQ ID NO: 813309 - DNA, 19 bp, Mus musculus
  siRNA target sequence for AY424292 (NM_198422.1,882-900).
gtacgtgattgctcttctt

SEQ ID NO: 813310 - DNA, 19 bp, Mus musculus
  siRNA target sequence for AY424292 (NM_198422.1,924-942).
ggtcccggaacggtacttt

SEQ ID NO: 813311 - DNA, 19 bp, Mus musculus
  siRNA target sequence for AY424292 (NM_198422.1,1056-1074).
caagccttgccctgactat

SEQ ID NO: 813312 - DNA, 19 bp, Mus musculus
  siRNA target sequence for AY424292 (NM_198422.1,1060-1078).
ccttgccctgactatgttt

SEQ ID NO: 813313 - DNA, 19 bp, Mus musculus
  siRNA target sequence for 9930124N15 (NM_198424.1,393-411).
gctggagaacgatcatgaa

SEQ ID NO: 813314 - DNA, 19 bp, Mus musculus
  siRNA target sequence for 9930124N15 (NM_198424.1,394-412).
ctggagaacgatcatgaat

SEQ ID NO: 813315 - DNA, 19 bp, Mus musculus
  siRNA target sequence for 9930124N15 (NM_198424.1,421-439).
ggcctgctggtggcattta

SEQ ID NO: 813316 - DNA, 19 bp, Mus musculus
  siRNA target sequence for 9930124N15 (NM_198424.1,423-441).
cctgctggtggcatttagt

SEQ ID NO: 813317 - DNA, 19 bp, Mus musculus
  siRNA target sequence for 9930124N15 (NM_198424.1,444-462).
ctgcaccactgtgttagta

SEQ ID NO: 813318 - DNA, 19 bp, Mus musculus
  siRNA target sequence for 9930124N15 (NM_198424.1,497-515).
gtctgctgccccatattga

SEQ ID NO: 813319 - DNA, 19 bp, Mus musculus
  siRNA target sequence for 9930124N15 (NM_198424.1,648-666).
ggtgggctgggtcaagttt

SEQ ID NO: 813320 - DNA, 19 bp, Mus musculus
  siRNA target sequence for 9930124N15 (NM_198424.1,695-713).
cagctcctgttgtacctat

SEQ ID NO: 813321 - DNA, 19 bp, Mus musculus
  siRNA target sequence for 9930124N15 (NM_198424.1,730-748).
gtgactgtctcccttagtt

SEQ ID NO: 813322 - DNA, 19 bp, Mus musculus
  siRNA target sequence for 9930124N15 (NM_198424.1,740-758).
cccttagtttagcttctaa

SEQ ID NO: 813323 - DNA, 19 bp, Mus musculus
  siRNA target sequence for 9930124N15 (NM_198424.1,890-908).
ctgtgggactagtgtttat

SEQ ID NO: 813324 - DNA, 19 bp, Mus musculus
  siRNA target sequence for 9930124N15 (NM_198424.1,910-928).
gcctttgccctacatttct

SEQ ID NO: 813325 - DNA, 19 bp, Mus musculus
  siRNA target sequence for Eid2 (NM_198425.1,438-456).
cagcgtcttgggcatcaat

SEQ ID NO: 813326 - DNA, 19 bp, Mus musculus
  siRNA target sequence for Eid2 (NM_198425.1,440-458).
gcgtcttgggcatcaatta

SEQ ID NO: 813327 - DNA, 19 bp, Mus musculus
  siRNA target sequence for Eid2 (NM_198425.1,568-586).
gcagccttcgacatagagt

SEQ ID NO: 813328 - DNA, 19 bp, Mus musculus
  siRNA target sequence for Eid2 (NM_198425.1,569-587).
cagccttcgacatagagta

SEQ ID NO: 813329 - DNA, 19 bp, Mus musculus
  siRNA target sequence for Eid2 (NM_198425.1,599-617).
cccagagggtggattttga

SEQ ID NO: 813330 - DNA, 19 bp, Mus musculus
  siRNA target sequence for Eid2 (NM_198425.1,616-634).
gacattttaacgtttacca

SEQ ID NO: 813331 - DNA, 19 bp, Mus musculus
  siRNA target sequence for Eid2 (NM_198425.1,644-662).
ctgcatcagaggtgatcaa

SEQ ID NO: 813332 - DNA, 19 bp, Mus musculus
  siRNA target sequence for Eid2 (NM_198425.1,654-672).
ggtgatcaatcctctaata

SEQ ID NO: 813333 - DNA, 19 bp, Mus musculus
  siRNA target sequence for Eid2 (NM_198425.1,657-675).
gatcaatcctctaatagaa

SEQ ID NO: 813334 - DNA, 19 bp, Mus musculus
  siRNA target sequence for Eid2 (NM_198425.1,660-678).
caatcctctaatagaagaa

SEQ ID NO: 813335 - DNA, 19 bp, Mus musculus
  siRNA target sequence for Eid2 (NM_198425.1,676-694).
gaactgggttgcgataagt

SEQ ID NO: 813336 - DNA, 19 bp, Mus musculus
  siRNA target sequence for Eid2 (NM_198425.1,679-697).
ctgggttgcgataagttca

SEQ ID NO: 813337 - DNA, 19 bp, Mus musculus
  siRNA target sequence for BC049711 (NM_198598.1,232-250).
cgactgaacccgaggaaaa

SEQ ID NO: 813338 - DNA, 19 bp, Mus musculus
  siRNA target sequence for BC049711 (NM_198598.1,274-292).
gcggcttcgccgatgaagt

SEQ ID NO: 813339 - DNA, 19 bp, Mus musculus
  siRNA target sequence for BC049711 (NM_198598.1,275-293).
cggcttcgccgatgaagta

SEQ ID NO: 813340 - DNA, 19 bp, Mus musculus
  siRNA target sequence for BC049711 (NM_198598.1,276-294).
ggcttcgccgatgaagtaa

SEQ ID NO: 813341 - DNA, 19 bp, Mus musculus
  siRNA target sequence for BC049711 (NM_198598.1,278-296).
cttcgccgatgaagtaaca

SEQ ID NO: 813342 - DNA, 19 bp, Mus musculus
  siRNA target sequence for BC049711 (NM_198598.1,311-329).
gggccaccagagctctata

SEQ ID NO: 813343 - DNA, 19 bp, Mus musculus
  siRNA target sequence for BC049711 (NM_198598.1,409-427).
ccagtgagcagtcgttatt

SEQ ID NO: 813344 - DNA, 19 bp, Mus musculus
  siRNA target sequence for BC049711 (NM_198598.1,438-456).
cggaaagcatacagattta

SEQ ID NO: 813345 - DNA, 19 bp, Mus musculus
  siRNA target sequence for BC049711 (NM_198598.1,440-458).
gaaagcatacagatttaca

SEQ ID NO: 813346 - DNA, 19 bp, Mus musculus
  siRNA target sequence for BC049711 (NM_198598.1,480-498).
caagcagtgttcgtagaaa

SEQ ID NO: 813347 - DNA, 19 bp, Mus musculus
  siRNA target sequence for BC049711 (NM_198598.1,484-502).
cagtgttcgtagaaaatca

SEQ ID NO: 813348 - DNA, 19 bp, Mus musculus
  siRNA target sequence for BC049711 (NM_198598.1,488-506).
gttcgtagaaaatcagtat

SEQ ID NO: 813349 - DNA, 19 bp, Mus musculus
  siRNA target sequence for BC049711 (NM_198598.1,570-588).
gattggttcaacaataaga

SEQ ID NO: 813350 - DNA, 19 bp, Mus musculus
  siRNA target sequence for BC049711 (NM_198598.1,654-672).
gaacttcgcatgaagactt

SEQ ID NO: 813351 - DNA, 19 bp, Mus musculus
  siRNA target sequence for BC049711 (NM_198598.1,711-729).
gagggggatgggcttttct

SEQ ID NO: 813352 - DNA, 19 bp, Mus musculus
  siRNA target sequence for LOC208158 (NM_198599.1,88-106).
cgctgactctgcatggtta

SEQ ID NO: 813353 - DNA, 19 bp, Mus musculus
  siRNA target sequence for LOC208158 (NM_198599.1,353-371).
cgcggacgcagctgtagta

SEQ ID NO: 813354 - DNA, 19 bp, Mus musculus
  siRNA target sequence for LOC208158 (NM_198599.1,369-387).
gtagcgaccacgtcttata

SEQ ID NO: 813355 - DNA, 19 bp, Mus musculus
  siRNA target sequence for LOC208158 (NM_198599.1,373-391).
cgaccacgtcttatagaca

SEQ ID NO: 813356 - DNA, 19 bp, Mus musculus
  siRNA target sequence for LOC208158 (NM_198599.1,379-397).
cgtcttatagacaggaatt

SEQ ID NO: 813357 - DNA, 19 bp, Mus musculus
  siRNA target sequence for LOC208158 (NM_198599.1,382-400).
cttatagacaggaattcca

SEQ ID NO: 813358 - DNA, 19 bp, Mus musculus
  siRNA target sequence for Pols (NM_198600.1,426-444).
gtggtgaaacggatcgaaa

SEQ ID NO: 813359 - DNA, 19 bp, Mus musculus
  siRNA target sequence for Pols (NM_198600.1,482-500).
gatatttggcagctttagt

SEQ ID NO: 813360 - DNA, 19 bp, Mus musculus
  siRNA target sequence for Pols (NM_198600.1,506-524).
cctctatcttccaacaagt

SEQ ID NO: 813361 - DNA, 19 bp, Mus musculus
  siRNA target sequence for Pols (NM_198600.1,555-573).
gaacgccctccattacagt

SEQ ID NO: 813362 - DNA, 19 bp, Mus musculus
  siRNA target sequence for Pols (NM_198600.1,559-577).
gccctccattacagttgtt

SEQ ID NO: 813363 - DNA, 19 bp, Mus musculus
  siRNA target sequence for Pols (NM_198600.1,611-629).
gccgtgctccatcaaagtt

SEQ ID NO: 813364 - DNA, 19 bp, Mus musculus
  siRNA target sequence for Pols (NM_198600.1,613-631).
cgtgctccatcaaagttct

SEQ ID NO: 813365 - DNA, 19 bp, Mus musculus
  siRNA target sequence for Pols (NM_198600.1,614-632).
gtgctccatcaaagttctt

SEQ ID NO: 813366 - DNA, 19 bp, Mus musculus
  siRNA target sequence for Pols (NM_198600.1,620-638).
catcaaagttcttgacaaa

SEQ ID NO: 813367 - DNA, 19 bp, Mus musculus
  siRNA target sequence for Pols (NM_198600.1,639-657).
gctacagtgcccatcataa

SEQ ID NO: 813368 - DNA, 19 bp, Mus musculus
  siRNA target sequence for Pols (NM_198600.1,640-658).
ctacagtgcccatcataaa

SEQ ID NO: 813369 - DNA, 19 bp, Mus musculus
  siRNA target sequence for Pols (NM_198600.1,643-661).
cagtgcccatcataaagct

SEQ ID NO: 813370 - DNA, 19 bp, Mus musculus
  siRNA target sequence for Pols (NM_198600.1,760-778).
cgctactgccatacttgat

SEQ ID NO: 813371 - DNA, 19 bp, Mus musculus
  siRNA target sequence for Pols (NM_198600.1,761-779).
gctactgccatacttgatt

SEQ ID NO: 813372 - DNA, 19 bp, Mus musculus
  siRNA target sequence for Pols (NM_198600.1,762-780).
ctactgccatacttgattt

SEQ ID NO: 813373 - DNA, 19 bp, Mus musculus
  siRNA target sequence for Pols (NM_198600.1,844-862).
cctacagcctcatcctaat

SEQ ID NO: 813374 - DNA, 19 bp, Mus musculus
  siRNA target sequence for Pols (NM_198600.1,881-899).
gttacatccaagaatcgat

SEQ ID NO: 813375 - DNA, 19 bp, Mus musculus
  siRNA target sequence for Pols (NM_198600.1,924-942).
ggaatgcttcttgtagaat

SEQ ID NO: 813376 - DNA, 19 bp, Mus musculus
  siRNA target sequence for Pols (NM_198600.1,925-943).
gaatgcttcttgtagaatt

SEQ ID NO: 813377 - DNA, 19 bp, Mus musculus
  siRNA target sequence for Pols (NM_198600.1,929-947).
gcttcttgtagaatttttt

SEQ ID NO: 813378 - DNA, 19 bp, Mus musculus
  siRNA target sequence for Pols (NM_198600.1,1009-1027).
cctatatcgccaaagaaga

SEQ ID NO: 813379 - DNA, 19 bp, Mus musculus
  siRNA target sequence for Pols (NM_198600.1,1134-1152).
gtgaagcaggtgtttgact

SEQ ID NO: 813380 - DNA, 19 bp, Mus musculus
  siRNA target sequence for Pols (NM_198600.1,1145-1163).
gtttgactacgcttacatt

SEQ ID NO: 813381 - DNA, 19 bp, Mus musculus
  siRNA target sequence for Pols (NM_198600.1,1222-1240).
gtactttaggaagaatcat

SEQ ID NO: 813382 - DNA, 19 bp, Mus musculus
  siRNA target sequence for Pols (NM_198600.1,1225-1243).
ctttaggaagaatcatcaa

SEQ ID NO: 813383 - DNA, 19 bp, Mus musculus
  siRNA target sequence for Pols (NM_198600.1,1317-1335).
gaccttgacaacaggatta

SEQ ID NO: 813384 - DNA, 19 bp, Mus musculus
  siRNA target sequence for Pols (NM_198600.1,1323-1341).
gacaacaggattaagataa

SEQ ID NO: 813385 - DNA, 19 bp, Mus musculus
  siRNA target sequence for Pols (NM_198600.1,1519-1537).
ccacacccagtgtttatca

SEQ ID NO: 813386 - DNA, 19 bp, Mus musculus
  siRNA target sequence for Pols (NM_198600.1,1630-1648).
cgttgatcatgacaacaaa

SEQ ID NO: 813387 - DNA, 19 bp, Mus musculus
  siRNA target sequence for Pols (NM_198600.1,1719-1737).
gtcgacggaaccacatctt

SEQ ID NO: 813388 - DNA, 19 bp, Mus musculus
  siRNA target sequence for LOC212085 (NM_198601.1,911-929).
gtcatccgggaggttttgt

SEQ ID NO: 813389 - DNA, 19 bp, Mus musculus
  siRNA target sequence for LOC212085 (NM_198601.1,913-931).
catccgggaggttttgttt

SEQ ID NO: 813390 - DNA, 19 bp, Mus musculus
  siRNA target sequence for LOC212085 (NM_198601.1,998-1016).
cagcatcagggcaatgcaa

SEQ ID NO: 813391 - DNA, 19 bp, Mus musculus
  siRNA target sequence for LOC212085 (NM_198601.1,1047-1065).
ggaacagtttacaaggatt

SEQ ID NO: 813392 - DNA, 19 bp, Mus musculus
  siRNA target sequence for LOC212085 (NM_198601.1,1051-1069).
cagtttacaaggattggtt

SEQ ID NO: 813393 - DNA, 19 bp, Mus musculus
  siRNA target sequence for LOC212085 (NM_198601.1,1350-1368).
gcagttttcgacccaattt

SEQ ID NO: 813394 - DNA, 19 bp, Mus musculus
  siRNA target sequence for LOC212085 (NM_198601.1,1353-1371).
gttttcgacccaatttgca

SEQ ID NO: 813395 - DNA, 19 bp, Mus musculus
  siRNA target sequence for LOC212085 (NM_198601.1,1377-1395).
ccaacatggtccatataat

SEQ ID NO: 813396 - DNA, 19 bp, Mus musculus
  siRNA target sequence for LOC212085 (NM_198601.1,1378-1396).
caacatggtccatataatt

SEQ ID NO: 813397 - DNA, 19 bp, Mus musculus
  siRNA target sequence for BC060267 (NM_198603.1,346-364).
cttggcaaaggtttgcaat

SEQ ID NO: 813398 - DNA, 19 bp, Mus musculus
  siRNA target sequence for BC060267 (NM_198603.1,350-368).
gcaaaggtttgcaatttga

SEQ ID NO: 813399 - DNA, 19 bp, Mus musculus
  siRNA target sequence for BC060267 (NM_198603.1,369-387).
gaggtggagggtacaaaca

SEQ ID NO: 813400 - DNA, 19 bp, Mus musculus
  siRNA target sequence for BC060267 (NM_198603.1,371-389).
ggtggagggtacaaacaaa

SEQ ID NO: 813401 - DNA, 19 bp, Mus musculus
  siRNA target sequence for BC060267 (NM_198603.1,437-455).
ccccacccatctaatgctt

SEQ ID NO: 813402 - DNA, 19 bp, Mus musculus
  siRNA target sequence for BC060267 (NM_198603.1,515-533).
gaaaccctggccaaacata

SEQ ID NO: 813403 - DNA, 19 bp, Mus musculus
  siRNA target sequence for BC060267 (NM_198603.1,629-647).
gggtcccaccactctttca

SEQ ID NO: 813404 - DNA, 19 bp, Mus musculus
  siRNA target sequence for BC060267 (NM_198603.1,980-998).
gacaataagcccaacatca

SEQ ID NO: 813405 - DNA, 19 bp, Mus musculus
  siRNA target sequence for BC060267 (NM_198603.1,988-1006).
gcccaacatcacatcatca

SEQ ID NO: 813406 - DNA, 19 bp, Mus musculus
  siRNA target sequence for BC060267 (NM_198603.1,1048-1066).
cccaaaacataccttgatt

SEQ ID NO: 813407 - DNA, 19 bp, Mus musculus
  siRNA target sequence for BC060267 (NM_198603.1,1055-1073).
cataccttgatttcaatca

SEQ ID NO: 813408 - DNA, 19 bp, Mus musculus
  siRNA target sequence for BC060267 (NM_198603.1,1096-1114).
cagacatgtccgcctaatt

SEQ ID NO: 813409 - DNA, 19 bp, Mus musculus
  siRNA target sequence for BC060267 (NM_198603.1,1169-1187).
cttcgtagtcgaaagatca

SEQ ID NO: 813410 - DNA, 19 bp, Mus musculus
  siRNA target sequence for BC060267 (NM_198603.1,1172-1190).
cgtagtcgaaagatcaaga

SEQ ID NO: 813411 - DNA, 19 bp, Mus musculus
  siRNA target sequence for BC060267 (NM_198603.1,1173-1191).
gtagtcgaaagatcaagat

SEQ ID NO: 813412 - DNA, 19 bp, Mus musculus
  siRNA target sequence for BC060267 (NM_198603.1,1397-1415).
cagaaaagcaccataccta

SEQ ID NO: 813413 - DNA, 19 bp, Mus musculus
  siRNA target sequence for BC060267 (NM_198603.1,1424-1442).
gagtggtttctctgtgtaa

SEQ ID NO: 813414 - DNA, 19 bp, Mus musculus
  siRNA target sequence for MGC30363 (NM_198604.1,459-477).
cctttggtcctccaaatga

SEQ ID NO: 813415 - DNA, 19 bp, Mus musculus
  siRNA target sequence for MGC30363 (NM_198604.1,497-515).
gtagcttcccgaattgaga

SEQ ID NO: 813416 - DNA, 19 bp, Mus musculus
  siRNA target sequence for MGC30363 (NM_198604.1,501-519).
cttcccgaattgagactta

SEQ ID NO: 813417 - DNA, 19 bp, Mus musculus
  siRNA target sequence for MGC30363 (NM_198604.1,603-621).
gacgccttcagcactatgt

SEQ ID NO: 813418 - DNA, 19 bp, Mus musculus
  siRNA target sequence for MGC30363 (NM_198604.1,691-709).
gaagaggcatggaagctat

SEQ ID NO: 813419 - DNA, 19 bp, Mus musculus
  siRNA target sequence for MGC30363 (NM_198604.1,694-712).
gaggcatggaagctatttt

SEQ ID NO: 813420 - DNA, 19 bp, Mus musculus
  siRNA target sequence for MGC30363 (NM_198604.1,756-774).
gggcccatgagctagaaat

SEQ ID NO: 813421 - DNA, 19 bp, Mus musculus
  siRNA target sequence for MGC30363 (NM_198604.1,757-775).
ggcccatgagctagaaata

SEQ ID NO: 813422 - DNA, 19 bp, Mus musculus
  siRNA target sequence for MGC30363 (NM_198604.1,758-776).
gcccatgagctagaaataa

SEQ ID NO: 813423 - DNA, 19 bp, Mus musculus
  siRNA target sequence for MGC30363 (NM_198604.1,1017-1035).
ctggtctgctgaatttgca

SEQ ID NO: 813424 - DNA, 19 bp, Mus musculus
  siRNA target sequence for MGC30363 (NM_198604.1,1155-1173).
gcacctctggccaaccttt

SEQ ID NO: 813425 - DNA, 19 bp, Mus musculus
  siRNA target sequence for MGC30363 (NM_198604.1,1174-1192).
ggatcctgtcagcttacaa

SEQ ID NO: 813426 - DNA, 19 bp, Mus musculus
  siRNA target sequence for MGC30363 (NM_198604.1,1212-1230).
gccagcggttccaacctta

SEQ ID NO: 813427 - DNA, 19 bp, Mus musculus
  siRNA target sequence for MGC30363 (NM_198604.1,1483-1501).
gtccttcctgcgacacata

SEQ ID NO: 813428 - DNA, 19 bp, Mus musculus
  siRNA target sequence for MGC30363 (NM_198604.1,1485-1503).
ccttcctgcgacacataaa

SEQ ID NO: 813429 - DNA, 19 bp, Mus musculus
  siRNA target sequence for MGC30363 (NM_198604.1,1486-1504).
cttcctgcgacacataaat

SEQ ID NO: 813430 - DNA, 19 bp, Mus musculus
  siRNA target sequence for MGC30363 (NM_198604.1,1993-2011).
gaagggtgagcagtacatt

SEQ ID NO: 813431 - DNA, 19 bp, Mus musculus
  siRNA target sequence for MGC30363 (NM_198604.1,2118-2136).
ccgaggggaggactttaga

SEQ ID NO: 813432 - DNA, 19 bp, Mus musculus
  siRNA target sequence for MGC30363 (NM_198604.1,2161-2179).
ggtgactgaggatacagat

SEQ ID NO: 813433 - DNA, 19 bp, Mus musculus
  siRNA target sequence for MGC30363 (NM_198604.1,2241-2259).
gctccccgaaggattctca

SEQ ID NO: 813434 - DNA, 19 bp, Mus musculus
  siRNA target sequence for MGC30363 (NM_198604.1,2242-2260).
ctccccgaaggattctcat

SEQ ID NO: 813435 - DNA, 19 bp, Mus musculus
  siRNA target sequence for MGC30363 (NM_198604.1,2486-2504).
gggaatgtggtggtagaaa

SEQ ID NO: 813436 - DNA, 19 bp, Mus musculus
  siRNA target sequence for MGC30363 (NM_198604.1,2539-2557).
ccactctcccactcatact

SEQ ID NO: 813437 - DNA, 19 bp, Mus musculus
  siRNA target sequence for MGC30363 (NM_198604.1,2761-2779).
gagggtcccccacatcata

SEQ ID NO: 813438 - DNA, 19 bp, Mus musculus
  siRNA target sequence for MGC30363 (NM_198604.1,2786-2804).
gacacgcccctgtctacat

SEQ ID NO: 813439 - DNA, 19 bp, Mus musculus
  siRNA target sequence for MGC30363 (NM_198604.1,2791-2809).
gcccctgtctacatcagaa

SEQ ID NO: 813440 - DNA, 19 bp, Mus musculus
  siRNA target sequence for LOC219114 (NM_198605.1,198-216).
cagaagtccagactctaaa

SEQ ID NO: 813441 - DNA, 19 bp, Mus musculus
  siRNA target sequence for LOC219114 (NM_198605.1,203-221).
gtccagactctaaaggata

SEQ ID NO: 813442 - DNA, 19 bp, Mus musculus
  siRNA target sequence for LOC219114 (NM_198605.1,273-291).
ggttcaaaaaggcaacaaa

SEQ ID NO: 813443 - DNA, 19 bp, Mus musculus
  siRNA target sequence for LOC219114 (NM_198605.1,480-498).
cgagcggttctgtttctga

SEQ ID NO: 813444 - DNA, 19 bp, Mus musculus
  siRNA target sequence for LOC219114 (NM_198605.1,533-551).
ggacttcagcggtacataa

SEQ ID NO: 813445 - DNA, 19 bp, Mus musculus
  siRNA target sequence for LOC219114 (NM_198605.1,534-552).
gacttcagcggtacataat

SEQ ID NO: 813446 - DNA, 19 bp, Mus musculus
  siRNA target sequence for LOC219114 (NM_198605.1,536-554).
cttcagcggtacataattt

SEQ ID NO: 813447 - DNA, 19 bp, Mus musculus
  siRNA target sequence for LOC219114 (NM_198605.1,689-707).
gagtgtgaaactcctaaat

SEQ ID NO: 813448 - DNA, 19 bp, Mus musculus
  siRNA target sequence for LOC219114 (NM_198605.1,693-711).
gtgaaactcctaaattaga

SEQ ID NO: 813449 - DNA, 19 bp, Mus musculus
  siRNA target sequence for LOC219114 (NM_198605.1,699-717).
ctcctaaattagaacactt

SEQ ID NO: 813450 - DNA, 19 bp, Mus musculus
  siRNA target sequence for LOC219114 (NM_198605.1,715-733).
ctttggtatatctgaacat

SEQ ID NO: 813451 - DNA, 19 bp, Mus musculus
  siRNA target sequence for LOC219114 (NM_198605.1,719-737).
ggtatatctgaacatacta

SEQ ID NO: 813452 - DNA, 19 bp, Mus musculus
  siRNA target sequence for LOC219114 (NM_198605.1,764-782).
ggacttaaaaatatgaaga

SEQ ID NO: 813453 - DNA, 19 bp, Mus musculus
  siRNA target sequence for LOC219114 (NM_198605.1,833-851).
gggcctgtgaccagtgata

SEQ ID NO: 813454 - DNA, 19 bp, Mus musculus
  siRNA target sequence for LOC219114 (NM_198605.1,841-859).
gaccagtgataattctttt

SEQ ID NO: 813455 - DNA, 19 bp, Mus musculus
  siRNA target sequence for LOC219114 (NM_198605.1,899-917).
gatgtggaatacgtaagtt

SEQ ID NO: 813456 - DNA, 19 bp, Mus musculus
  siRNA target sequence for LOC219114 (NM_198605.1,939-957).
gcactcctggtttgaaaat

SEQ ID NO: 813457 - DNA, 19 bp, Mus musculus
  siRNA target sequence for LOC219114 (NM_198605.1,975-993).
gaacagatttggtatctat

SEQ ID NO: 813458 - DNA, 19 bp, Mus musculus
  siRNA target sequence for LOC219114 (NM_198605.1,985-1003).
ggtatctatagattatcca

SEQ ID NO: 813459 - DNA, 19 bp, Mus musculus
  siRNA target sequence for LOC219114 (NM_198605.1,1004-1022).
ctatcaaagccaaatagtt

SEQ ID NO: 813460 - DNA, 19 bp, Mus musculus
  siRNA target sequence for LOC219114 (NM_198605.1,1012-1030).
gccaaatagttcatcaact

SEQ ID NO: 813461 - DNA, 19 bp, Mus musculus
  siRNA target sequence for LOC219114 (NM_198605.1,1020-1038).
gttcatcaactgatttgga

SEQ ID NO: 813462 - DNA, 19 bp, Mus musculus
  siRNA target sequence for LOC219114 (NM_198605.1,1046-1064).
gattgtgttccgttaattt

SEQ ID NO: 813463 - DNA, 19 bp, Mus musculus
  siRNA target sequence for LOC219114 (NM_198605.1,1113-1131).
caattacttcttgtgaaaa

SEQ ID NO: 813464 - DNA, 19 bp, Mus musculus
  siRNA target sequence for LOC219114 (NM_198605.1,1175-1193).
gacattctccagatgataa

SEQ ID NO: 813465 - DNA, 19 bp, Mus musculus
  siRNA target sequence for LOC219114 (NM_198605.1,1215-1233).
cttctcccttggatgttaa

SEQ ID NO: 813466 - DNA, 19 bp, Mus musculus
  siRNA target sequence for LOC219114 (NM_198605.1,1218-1236).
ctcccttggatgttaaagt

SEQ ID NO: 813467 - DNA, 19 bp, Mus musculus
  siRNA target sequence for MGC65348 (NM_198606.1,70-88).
gccgaaaccctgacaacta

SEQ ID NO: 813468 - DNA, 19 bp, Mus musculus
  siRNA target sequence for MGC65348 (NM_198606.1,73-91).
gaaaccctgacaactatgt

SEQ ID NO: 813469 - DNA, 19 bp, Mus musculus
  siRNA target sequence for MGC65348 (NM_198606.1,131-149).
ctatgatcccactttacat

SEQ ID NO: 813470 - DNA, 19 bp, Mus musculus
  siRNA target sequence for MGC65348 (NM_198606.1,139-157).
ccactttacatccttttga

SEQ ID NO: 813471 - DNA, 19 bp, Mus musculus
  siRNA target sequence for MGC65348 (NM_198606.1,159-177).
gtcccacgagaatatgtga

SEQ ID NO: 813472 - DNA, 19 bp, Mus musculus
  siRNA target sequence for MGC65348 (NM_198606.1,168-186).
gaatatgtgagagctttaa

SEQ ID NO: 813473 - DNA, 19 bp, Mus musculus
  siRNA target sequence for MGC65348 (NM_198606.1,194-212).
caagttggaacgagtgttt

SEQ ID NO: 813474 - DNA, 19 bp, Mus musculus
  siRNA target sequence for MGC65348 (NM_198606.1,307-325).
catgtgatggagaggttaa

SEQ ID NO: 813475 - DNA, 19 bp, Mus musculus
  siRNA target sequence for MGC65348 (NM_198606.1,310-328).
gtgatggagaggttaaaat

SEQ ID NO: 813476 - DNA, 19 bp, Mus musculus
  siRNA target sequence for MGC65348 (NM_198606.1,312-330).
gatggagaggttaaaattt

SEQ ID NO: 813477 - DNA, 19 bp, Mus musculus
  siRNA target sequence for MGC65348 (NM_198606.1,316-334).
gagaggttaaaatttggaa

SEQ ID NO: 813478 - DNA, 19 bp, Mus musculus
  siRNA target sequence for MGC65348 (NM_198606.1,336-354).
ctgactaaacgaaaatgta

SEQ ID NO: 813479 - DNA, 19 bp, Mus musculus
  siRNA target sequence for MGC65348 (NM_198606.1,492-510).
gagccgttgtacacagtat

SEQ ID NO: 813480 - DNA, 19 bp, Mus musculus
  siRNA target sequence for MGC65348 (NM_198606.1,497-515).
gttgtacacagtattagga

SEQ ID NO: 813481 - DNA, 19 bp, Mus musculus
  siRNA target sequence for MGC65348 (NM_198606.1,503-521).
cacagtattaggaaagaca

SEQ ID NO: 813482 - DNA, 19 bp, Mus musculus
  siRNA target sequence for MGC65348 (NM_198606.1,585-603).
gacatttgggatgaacaaa

SEQ ID NO: 813483 - DNA, 19 bp, Mus musculus
  siRNA target sequence for MGC65348 (NM_198606.1,587-605).
catttgggatgaacaaaga

SEQ ID NO: 813484 - DNA, 19 bp, Mus musculus
  siRNA target sequence for MGC65348 (NM_198606.1,610-628).
gccctgtgtgctcaatgaa

SEQ ID NO: 813485 - DNA, 19 bp, Mus musculus
  siRNA target sequence for MGC65348 (NM_198606.1,612-630).
cctgtgtgctcaatgaact

SEQ ID NO: 813486 - DNA, 19 bp, Mus musculus
  siRNA target sequence for MGC65348 (NM_198606.1,622-640).
caatgaactggggatttga

SEQ ID NO: 813487 - DNA, 19 bp, Mus musculus
  siRNA target sequence for MGC65348 (NM_198606.1,633-651).
ggatttgacagcataagta

SEQ ID NO: 813488 - DNA, 19 bp, Mus musculus
  siRNA target sequence for MGC65348 (NM_198606.1,639-657).
gacagcataagtagtgtta

SEQ ID NO: 813489 - DNA, 19 bp, Mus musculus
  siRNA target sequence for MGC65348 (NM_198606.1,643-661).
gcataagtagtgttaaatt

SEQ ID NO: 813490 - DNA, 19 bp, Mus musculus
  siRNA target sequence for MGC65348 (NM_198606.1,686-704).
gggaagttgtgcttctgat

SEQ ID NO: 813491 - DNA, 19 bp, Mus musculus
  siRNA target sequence for MGC65348 (NM_198606.1,730-748).
ggcaagctactcctttgaa

SEQ ID NO: 813492 - DNA, 19 bp, Mus musculus
  siRNA target sequence for MGC65348 (NM_198606.1,736-754).
ctactcctttgaaaaaggt

SEQ ID NO: 813493 - DNA, 19 bp, Mus musculus
  siRNA target sequence for MGC65348 (NM_198606.1,739-757).
ctcctttgaaaaaggttat

SEQ ID NO: 813494 - DNA, 19 bp, Mus musculus
  siRNA target sequence for MGC65348 (NM_198606.1,759-777).
ctggaaatgaggacaaata

SEQ ID NO: 813495 - DNA, 19 bp, Mus musculus
  siRNA target sequence for MGC65348 (NM_198606.1,791-809).
ccctatggaagctttcaat

SEQ ID NO: 813496 - DNA, 19 bp, Mus musculus
  siRNA target sequence for MGC65348 (NM_198606.1,792-810).
cctatggaagctttcaatt

SEQ ID NO: 813497 - DNA, 19 bp, Mus musculus
  siRNA target sequence for MGC65348 (NM_198606.1,797-815).
ggaagctttcaattttact

SEQ ID NO: 813498 - DNA, 19 bp, Mus musculus
  siRNA target sequence for MGC65348 (NM_198606.1,806-824).
caattttactgcagcaaat

SEQ ID NO: 813499 - DNA, 19 bp, Mus musculus
  siRNA target sequence for MGC65348 (NM_198606.1,825-843).
gaagactataacttgtata

SEQ ID NO: 813500 - DNA, 19 bp, Mus musculus
  siRNA target sequence for MGC65348 (NM_198606.1,828-846).
gactataacttgtatactt

SEQ ID NO: 813501 - DNA, 19 bp, Mus musculus
  siRNA target sequence for MGC65348 (NM_198606.1,893-911).
cgtgtctgcagtacttgat

SEQ ID NO: 813502 - DNA, 19 bp, Mus musculus
  siRNA target sequence for MGC65348 (NM_198606.1,957-975).
gataagtctattagaatct

SEQ ID NO: 813503 - DNA, 19 bp, Mus musculus
  siRNA target sequence for MGC65348 (NM_198606.1,991-1009).
gccgaagcagggaagtgta

SEQ ID NO: 813504 - DNA, 19 bp, Mus musculus
  siRNA target sequence for MGC65348 (NM_198606.1,992-1010).
ccgaagcagggaagtgtat

SEQ ID NO: 813505 - DNA, 19 bp, Mus musculus
  siRNA target sequence for MGC65348 (NM_198606.1,1005-1023).
gtgtatcatacgaaacgaa

SEQ ID NO: 813506 - DNA, 19 bp, Mus musculus
  siRNA target sequence for MGC65348 (NM_198606.1,1015-1033).
cgaaacgaatgcaacatgt

SEQ ID NO: 813507 - DNA, 19 bp, Mus musculus
  siRNA target sequence for MGC65348 (NM_198606.1,1058-1076).
cagcaagtacattatgtgt

SEQ ID NO: 813508 - DNA, 19 bp, Mus musculus
  siRNA target sequence for MGC65348 (NM_198606.1,1077-1095).
gggtctgacgaaatgaaca

SEQ ID NO: 813509 - DNA, 19 bp, Mus musculus
  siRNA target sequence for MGC65348 (NM_198606.1,1078-1096).
ggtctgacgaaatgaacat

SEQ ID NO: 813510 - DNA, 19 bp, Mus musculus
  siRNA target sequence for MGC65348 (NM_198606.1,1111-1129).
ctaatgcgtctgaaaaact

SEQ ID NO: 813511 - DNA, 19 bp, Mus musculus
  siRNA target sequence for MGC65348 (NM_198606.1,1136-1154).
gcttacatcacgagaaaaa

SEQ ID NO: 813512 - DNA, 19 bp, Mus musculus
  siRNA target sequence for MGC65348 (NM_198606.1,1230-1248).
cgacatctcccgaaatcta

SEQ ID NO: 813513 - DNA, 19 bp, Mus musculus
  siRNA target sequence for MGC65348 (NM_198606.1,1236-1254).
ctcccgaaatctatctaca

SEQ ID NO: 813514 - DNA, 19 bp, Mus musculus
  siRNA target sequence for MGC65348 (NM_198606.1,1301-1319).
ggaaatgaatcgtcgtaaa

SEQ ID NO: 813515 - DNA, 19 bp, Mus musculus
  siRNA target sequence for MGC65348 (NM_198606.1,1368-1386).
gtagtggcggttgtgaaat

SEQ ID NO: 813516 - DNA, 19 bp, Mus musculus
  siRNA target sequence for MGC54796 (NM_198607.1,71-89).
ctgttggtggcgtcgttat

SEQ ID NO: 813517 - DNA, 19 bp, Mus musculus
  siRNA target sequence for MGC54796 (NM_198607.1,387-405).
gctcgctgcgcctgtttga

SEQ ID NO: 813518 - DNA, 19 bp, Mus musculus
  siRNA target sequence for MGC54796 (NM_198607.1,535-553).
ctcgccggatcgagtagta

SEQ ID NO: 813519 - DNA, 19 bp, Mus musculus
  siRNA target sequence for MGC54796 (NM_198607.1,537-555).
cgccggatcgagtagtaca

SEQ ID NO: 813520 - DNA, 19 bp, Mus musculus
  siRNA target sequence for MGC69820 (NM_198608.1,558-576).
gatgacagccccaagtata

SEQ ID NO: 813521 - DNA, 19 bp, Mus musculus
  siRNA target sequence for MGC69820 (NM_198608.1,561-579).
gacagccccaagtataact

SEQ ID NO: 813522 - DNA, 19 bp, Mus musculus
  siRNA target sequence for MGC69820 (NM_198608.1,593-611).
caacggggattatgagttt

SEQ ID NO: 813523 - DNA, 19 bp, Mus musculus
  siRNA target sequence for MGC69820 (NM_198608.1,627-645).
cgggtgttacagctgtatt

SEQ ID NO: 813524 - DNA, 19 bp, Mus musculus
  siRNA target sequence for MGC69820 (NM_198608.1,686-704).
gcgctgtggcctcctatta

SEQ ID NO: 813525 - DNA, 19 bp, Mus musculus
  siRNA target sequence for MGC69820 (NM_198608.1,688-706).
gctgtggcctcctattaga

SEQ ID NO: 813526 - DNA, 19 bp, Mus musculus
  siRNA target sequence for MGC69820 (NM_198608.1,689-707).
ctgtggcctcctattagat

SEQ ID NO: 813527 - DNA, 19 bp, Mus musculus
  siRNA target sequence for MGC69820 (NM_198608.1,693-711).
ggcctcctattagatagaa

SEQ ID NO: 813528 - DNA, 19 bp, Mus musculus
  siRNA target sequence for MGC69820 (NM_198608.1,1278-1296).
gggacgcacctgctaagta

SEQ ID NO: 813529 - DNA, 19 bp, Mus musculus
  siRNA target sequence for MGC69820 (NM_198608.1,1435-1453).
ccagcgagcgactaagtca

SEQ ID NO: 813530 - DNA, 19 bp, Mus musculus
  siRNA target sequence for MGC69820 (NM_198608.1,1661-1679).
ctcggaggggcctctgatt

SEQ ID NO: 813531 - DNA, 19 bp, Mus musculus
  siRNA target sequence for MGC69820 (NM_198608.1,1663-1681).
cggaggggcctctgattgt

SEQ ID NO: 813532 - DNA, 19 bp, Mus musculus
  siRNA target sequence for MGC67646 (NM_198610.1,484-502).
gctacctgacagtcaacat

SEQ ID NO: 813533 - DNA, 19 bp, Mus musculus
  siRNA target sequence for MGC67646 (NM_198610.1,613-631).
ccatcaagcagaagatctt

SEQ ID NO: 813534 - DNA, 19 bp, Mus musculus
  siRNA target sequence for MGC67646 (NM_198610.1,688-706).
gggaggaccttgtgtatca

SEQ ID NO: 813535 - DNA, 19 bp, Mus musculus
  siRNA target sequence for MGC67646 (NM_198610.1,728-746).
ggtccggatctcagacaat

SEQ ID NO: 813536 - DNA, 19 bp, Mus musculus
  siRNA target sequence for MGC67646 (NM_198610.1,741-759).
gacaatggtccctatgagt

SEQ ID NO: 813537 - DNA, 19 bp, Mus musculus
  siRNA target sequence for MGC67646 (NM_198610.1,804-822).
ctcgcctcaggcaacatct

SEQ ID NO: 813538 - DNA, 19 bp, Mus musculus
  siRNA target sequence for MGC67646 (NM_198610.1,968-986).
ggacggggagccgatagat

SEQ ID NO: 813539 - DNA, 19 bp, Mus musculus
  siRNA target sequence for MGC67646 (NM_198610.1,1068-1086).
gacgtggatgataccaaaa

SEQ ID NO: 813540 - DNA, 19 bp, Mus musculus
  siRNA target sequence for MGC67646 (NM_198610.1,1252-1270).
gcgccgagccggtctactt

SEQ ID NO: 813541 - DNA, 19 bp, Mus musculus
  siRNA target sequence for MGC67646 (NM_198610.1,1497-1515).
ctagtccacggatttcaga

SEQ ID NO: 813542 - DNA, 19 bp, Mus musculus
  siRNA target sequence for MGC67646 (NM_198610.1,1667-1685).
cctgggctccactgataca

SEQ ID NO: 813543 - DNA, 19 bp, Mus musculus
  siRNA target sequence for MGC67646 (NM_198610.1,1692-1710).
cggctcatcgtgttcgaaa

SEQ ID NO: 813544 - DNA, 19 bp, Mus musculus
  siRNA target sequence for MGC67646 (NM_198610.1,1693-1711).
ggctcatcgtgttcgaaaa

SEQ ID NO: 813545 - DNA, 19 bp, Mus musculus
  siRNA target sequence for MGC67646 (NM_198610.1,1701-1719).
gtgttcgaaaacccaaata

SEQ ID NO: 813546 - DNA, 19 bp, Mus musculus
  siRNA target sequence for B3gnt4 (NM_198611.1,171-189).
gctgcctgctccttctgaa

SEQ ID NO: 813547 - DNA, 19 bp, Mus musculus
  siRNA target sequence for B3gnt4 (NM_198611.1,260-278).
cagtgctcacccaacctaa

SEQ ID NO: 813548 - DNA, 19 bp, Mus musculus
  siRNA target sequence for B3gnt4 (NM_198611.1,264-282).
gctcacccaacctaacagt

SEQ ID NO: 813549 - DNA, 19 bp, Mus musculus
  siRNA target sequence for B3gnt4 (NM_198611.1,265-283).
ctcacccaacctaacagtt

SEQ ID NO: 813550 - DNA, 19 bp, Mus musculus
  siRNA target sequence for B3gnt4 (NM_198611.1,270-288).
ccaacctaacagttgttaa

SEQ ID NO: 813551 - DNA, 19 bp, Mus musculus
  siRNA target sequence for B3gnt4 (NM_198611.1,309-327).
gccgtcatcgcctcttctt

SEQ ID NO: 813552 - DNA, 19 bp, Mus musculus
  siRNA target sequence for B3gnt4 (NM_198611.1,310-328).
ccgtcatcgcctcttctta

SEQ ID NO: 813553 - DNA, 19 bp, Mus musculus
  siRNA target sequence for B3gnt4 (NM_198611.1,311-329).
cgtcatcgcctcttcttaa

SEQ ID NO: 813554 - DNA, 19 bp, Mus musculus
  siRNA target sequence for B3gnt4 (NM_198611.1,314-332).
catcgcctcttcttaacct

SEQ ID NO: 813555 - DNA, 19 bp, Mus musculus
  siRNA target sequence for B3gnt4 (NM_198611.1,412-430).
gtcacagcctgctcatatt

SEQ ID NO: 813556 - DNA, 19 bp, Mus musculus
  siRNA target sequence for B3gnt4 (NM_198611.1,434-452).
cagcgttcagccattcgaa

SEQ ID NO: 813557 - DNA, 19 bp, Mus musculus
  siRNA target sequence for B3gnt4 (NM_198611.1,564-582).
ggcagtttgatgacatctt

SEQ ID NO: 813558 - DNA, 19 bp, Mus musculus
  siRNA target sequence for B3gnt4 (NM_198611.1,660-678).
gcacacaggcccacttcat

SEQ ID NO: 813559 - DNA, 19 bp, Mus musculus
  siRNA target sequence for B3gnt4 (NM_198611.1,661-679).
cacacaggcccacttcata

SEQ ID NO: 813560 - DNA, 19 bp, Mus musculus
  siRNA target sequence for B3gnt4 (NM_198611.1,663-681).
cacaggcccacttcatact

SEQ ID NO: 813561 - DNA, 19 bp, Mus musculus
  siRNA target sequence for B3gnt4 (NM_198611.1,665-683).
caggcccacttcatactaa

SEQ ID NO: 813562 - DNA, 19 bp, Mus musculus
  siRNA target sequence for B3gnt4 (NM_198611.1,691-709).
cgatgacgtctttatccat

SEQ ID NO: 813563 - DNA, 19 bp, Mus musculus
  siRNA target sequence for B3gnt4 (NM_198611.1,714-732).
ccaatgtgctcgagttctt

SEQ ID NO: 813564 - DNA, 19 bp, Mus musculus
  siRNA target sequence for B3gnt4 (NM_198611.1,798-816).
ggaacaccaaagttaaata

SEQ ID NO: 813565 - DNA, 19 bp, Mus musculus
  siRNA target sequence for B3gnt4 (NM_198611.1,847-865).
ccactacccaccttatgca

SEQ ID NO: 813566 - DNA, 19 bp, Mus musculus
  siRNA target sequence for B3gnt4 (NM_198611.1,942-960).
ctattgacgatgtctttgt

SEQ ID NO: 813567 - DNA, 19 bp, Mus musculus
  siRNA target sequence for B3gnt4 (NM_198611.1,1012-1030).
caagacatttggaatccaa

SEQ ID NO: 813568 - DNA, 19 bp, Mus musculus
  siRNA target sequence for B3gnt4 (NM_198611.1,1047-1065).
gggacccttgtctgtacaa

SEQ ID NO: 813569 - DNA, 19 bp, Mus musculus
  siRNA target sequence for MGC59592 (NM_198612.1,588-606).
cagtggcccgactcctata

SEQ ID NO: 813570 - DNA, 19 bp, Mus musculus
  siRNA target sequence for MGC59592 (NM_198612.1,590-608).
gtggcccgactcctataca

SEQ ID NO: 813571 - DNA, 19 bp, Mus musculus
  siRNA target sequence for MGC59592 (NM_198612.1,592-610).
ggcccgactcctatacaaa

SEQ ID NO: 813572 - DNA, 19 bp, Mus musculus
  siRNA target sequence for MGC59592 (NM_198612.1,594-612).
cccgactcctatacaaaga

SEQ ID NO: 813573 - DNA, 19 bp, Mus musculus
  siRNA target sequence for MGC59592 (NM_198612.1,597-615).
gactcctatacaaagaagt

SEQ ID NO: 813574 - DNA, 19 bp, Mus musculus
  siRNA target sequence for MGC59592 (NM_198612.1,623-641).
cagactctaccctatcaca

SEQ ID NO: 813575 - DNA, 19 bp, Mus musculus
  siRNA target sequence for MGC59592 (NM_198612.1,625-643).
gactctaccctatcacatt

SEQ ID NO: 813576 - DNA, 19 bp, Mus musculus
  siRNA target sequence for MGC59592 (NM_198612.1,918-936).
ggggtcatgctcatgaact

SEQ ID NO: 813577 - DNA, 19 bp, Mus musculus
  siRNA target sequence for MGC59592 (NM_198612.1,919-937).
gggtcatgctcatgaactt

SEQ ID NO: 813578 - DNA, 19 bp, Mus musculus
  siRNA target sequence for MGC59592 (NM_198612.1,932-950).
gaacttgactcgcataaga

SEQ ID NO: 813579 - DNA, 19 bp, Mus musculus
  siRNA target sequence for MGC59592 (NM_198612.1,1208-1226).
ctaccacgacgacaaacaa

SEQ ID NO: 813580 - DNA, 19 bp, Mus musculus
  siRNA target sequence for MGC59592 (NM_198612.1,1266-1284).
ccctttcaggacaatctgt

SEQ ID NO: 813581 - DNA, 19 bp, Mus musculus
  siRNA target sequence for MGC59592 (NM_198612.1,1268-1286).
ctttcaggacaatctgttt

SEQ ID NO: 813582 - DNA, 19 bp, Mus musculus
  siRNA target sequence for MGC59592 (NM_198612.1,1301-1319).
ccctctgcagctgaagttt

SEQ ID NO: 813583 - DNA, 19 bp, Mus musculus
  siRNA target sequence for MGC59592 (NM_198612.1,1345-1363).
gacggatcccccaggtttt

SEQ ID NO: 813584 - DNA, 19 bp, Mus musculus
  siRNA target sequence for Ap2s1 (NM_198613.1,211-229).
ggaacttcaagatcatcta

SEQ ID NO: 813585 - DNA, 19 bp, Mus musculus
  siRNA target sequence for Ap2s1 (NM_198613.1,235-253).
gctacgctggcctctactt

SEQ ID NO: 813586 - DNA, 19 bp, Mus musculus
  siRNA target sequence for Ap2s1 (NM_198613.1,256-274).
gcatctgcgtggatgtcaa

SEQ ID NO: 813587 - DNA, 19 bp, Mus musculus
  siRNA target sequence for Ap2s1 (NM_198613.1,308-326).
caacttcgtagaagtgtta

SEQ ID NO: 813588 - DNA, 19 bp, Mus musculus
  siRNA target sequence for Ap2s1 (NM_198613.1,388-406).
cggtggtagatgagatgtt

SEQ ID NO: 813589 - DNA, 19 bp, Mus musculus
  siRNA target sequence for LOC237397 (NM_198614.1,472-490).
cagccacacgacatgtgat

SEQ ID NO: 813590 - DNA, 19 bp, Mus musculus
  siRNA target sequence for LOC237397 (NM_198614.1,475-493).
ccacacgacatgtgattca

SEQ ID NO: 813591 - DNA, 19 bp, Mus musculus
  siRNA target sequence for LOC237397 (NM_198614.1,549-567).
gcgcagggtgccatgtcat

SEQ ID NO: 813592 - DNA, 19 bp, Mus musculus
  siRNA target sequence for LOC237397 (NM_198614.1,550-568).
cgcagggtgccatgtcatt

SEQ ID NO: 813593 - DNA, 19 bp, Mus musculus
  siRNA target sequence for LOC237397 (NM_198614.1,637-655).
gcaaggagtcccttttcca

SEQ ID NO: 813594 - DNA, 19 bp, Mus musculus
  siRNA target sequence for LOC237397 (NM_198614.1,846-864).
ctgctgtctcgctctgtat

SEQ ID NO: 813595 - DNA, 19 bp, Mus musculus
  siRNA target sequence for LOC237397 (NM_198614.1,903-921).
gtgagccagctgaaacagt

SEQ ID NO: 813596 - DNA, 19 bp, Mus musculus
  siRNA target sequence for LOC237397 (NM_198614.1,1173-1191).
gcccggagcatcaattgct

SEQ ID NO: 813597 - DNA, 19 bp, Mus musculus
  siRNA target sequence for LOC237397 (NM_198614.1,1233-1251).
cggagcaccatcatcaaaa

SEQ ID NO: 813598 - DNA, 19 bp, Mus musculus
  siRNA target sequence for MGC69704 (NM_198615.1,500-518).
ccgtgcacgggaagagatt

SEQ ID NO: 813599 - DNA, 19 bp, Mus musculus
  siRNA target sequence for MGC69704 (NM_198615.1,502-520).
gtgcacgggaagagattga

SEQ ID NO: 813600 - DNA, 19 bp, Mus musculus
  siRNA target sequence for MGC69704 (NM_198615.1,718-736).
cccctgagcccttctatgt

SEQ ID NO: 813601 - DNA, 19 bp, Mus musculus
  siRNA target sequence for MGC69704 (NM_198615.1,799-817).
gcaatgggggcttcacatt

SEQ ID NO: 813602 - DNA, 19 bp, Mus musculus
  siRNA target sequence for MGC69704 (NM_198615.1,800-818).
caatgggggcttcacattt

SEQ ID NO: 813603 - DNA, 19 bp, Mus musculus
  siRNA target sequence for MGC67311 (NM_198616.1,560-578).
ccttaaggagctttgctta

SEQ ID NO: 813604 - DNA, 19 bp, Mus musculus
  siRNA target sequence for DAP-3 (NM_198618.1,282-300).
ctgaccaacagcatatgga

SEQ ID NO: 813605 - DNA, 19 bp, Mus musculus
  siRNA target sequence for DAP-3 (NM_198618.1,794-812).
cccgggaagcgagactata

SEQ ID NO: 813606 - DNA, 19 bp, Mus musculus
  siRNA target sequence for DAP-3 (NM_198618.1,795-813).
ccgggaagcgagactataa

SEQ ID NO: 813607 - DNA, 19 bp, Mus musculus
  siRNA target sequence for DAP-3 (NM_198618.1,1008-1026).
ggagctctgatgacaattt

SEQ ID NO: 813608 - DNA, 19 bp, Mus musculus
  siRNA target sequence for DAP-3 (NM_198618.1,1300-1318).
ggccaaagccaggacttat

SEQ ID NO: 813609 - DNA, 19 bp, Mus musculus
  siRNA target sequence for DAP-3 (NM_198618.1,1302-1320).
ccaaagccaggacttatca

SEQ ID NO: 813610 - DNA, 19 bp, Mus musculus
  siRNA target sequence for DAP-3 (NM_198618.1,1308-1326).
ccaggacttatcactattt

SEQ ID NO: 813611 - DNA, 19 bp, Mus musculus
  siRNA target sequence for DAP-3 (NM_198618.1,1462-1480).
caagacgtctccaaaagca

SEQ ID NO: 813612 - DNA, 19 bp, Mus musculus
  siRNA target sequence for DAP-3 (NM_198618.1,1605-1623).
gacagctaagcgaagagtt

SEQ ID NO: 813613 - DNA, 19 bp, Mus musculus
  siRNA target sequence for DAP-3 (NM_198618.1,2172-2190).
ggagtcgaagagaattcca

SEQ ID NO: 813614 - DNA, 19 bp, Mus musculus
  siRNA target sequence for DAP-3 (NM_198618.1,2603-2621).
gatggcgagtggttcatca

SEQ ID NO: 813615 - DNA, 19 bp, Mus musculus
  siRNA target sequence for DAP-3 (NM_198618.1,2607-2625).
gcgagtggttcatcaagat

SEQ ID NO: 813616 - DNA, 19 bp, Mus musculus
  siRNA target sequence for DAP-3 (NM_198618.1,2695-2713).
gctgcccgaggagatctta

SEQ ID NO: 813617 - DNA, 19 bp, Mus musculus
  siRNA target sequence for DAP-3 (NM_198618.1,2957-2975).
gtccctccgccgataccaa

SEQ ID NO: 813618 - DNA, 19 bp, Mus musculus
  siRNA target sequence for MGC67181 (NM_198619.1,1180-1198).
cacgttactatcatcttca

SEQ ID NO: 813619 - DNA, 19 bp, Mus musculus
  siRNA target sequence for MGC67181 (NM_198619.1,1182-1200).
cgttactatcatcttcaat

SEQ ID NO: 813620 - DNA, 19 bp, Mus musculus
  siRNA target sequence for MGC67181 (NM_198619.1,1259-1277).
cttttctcaatcacatagt

SEQ ID NO: 813621 - DNA, 19 bp, Mus musculus
  siRNA target sequence for MGC68340 (NM_198620.1,484-502).
gattgatcggtcttgcttt

SEQ ID NO: 813622 - DNA, 19 bp, Mus musculus
  siRNA target sequence for MGC68340 (NM_198620.1,488-506).
gatcggtcttgctttgaaa

SEQ ID NO: 813623 - DNA, 19 bp, Mus musculus
  siRNA target sequence for MGC68340 (NM_198620.1,571-589).
ccggctaaaaggtcaagta

SEQ ID NO: 813624 - DNA, 19 bp, Mus musculus
  siRNA target sequence for MGC68340 (NM_198620.1,572-590).
cggctaaaaggtcaagtaa

SEQ ID NO: 813625 - DNA, 19 bp, Mus musculus
  siRNA target sequence for MGC68340 (NM_198620.1,638-656).
gtggcttgccggaaagttt

SEQ ID NO: 813626 - DNA, 19 bp, Mus musculus
  siRNA target sequence for MGC68340 (NM_198620.1,640-658).
ggcttgccggaaagtttca

SEQ ID NO: 813627 - DNA, 19 bp, Mus musculus
  siRNA target sequence for MGC68340 (NM_198620.1,642-660).
cttgccggaaagtttcaca

SEQ ID NO: 813628 - DNA, 19 bp, Mus musculus
  siRNA target sequence for MGC68340 (NM_198620.1,647-665).
cggaaagtttcacaaaact

SEQ ID NO: 813629 - DNA, 19 bp, Mus musculus
  siRNA target sequence for MGC68340 (NM_198620.1,649-667).
gaaagtttcacaaaactgt

SEQ ID NO: 813630 - DNA, 19 bp, Mus musculus
  siRNA target sequence for MGC68340 (NM_198620.1,732-750).
gagtagcactcatggaaaa

SEQ ID NO: 813631 - DNA, 19 bp, Mus musculus
  siRNA target sequence for MGC68340 (NM_198620.1,798-816).
ccaggaggttttatgaaga

SEQ ID NO: 813632 - DNA, 19 bp, Mus musculus
  siRNA target sequence for MGC68340 (NM_198620.1,834-852).
gtgaagaagcaaatatgct

SEQ ID NO: 813633 - DNA, 19 bp, Mus musculus
  siRNA target sequence for MGC68340 (NM_198620.1,859-877).
catgctgcttggactcaat

SEQ ID NO: 813634 - DNA, 19 bp, Mus musculus
  siRNA target sequence for MGC68340 (NM_198620.1,863-881).
ctgcttggactcaatgcta

SEQ ID NO: 813635 - DNA, 19 bp, Mus musculus
  siRNA target sequence for MGC68340 (NM_198620.1,865-883).
gcttggactcaatgctatt

SEQ ID NO: 813636 - DNA, 19 bp, Mus musculus
  siRNA target sequence for MGC68340 (NM_198620.1,869-887).
ggactcaatgctattgact

SEQ ID NO: 813637 - DNA, 19 bp, Mus musculus
  siRNA target sequence for MGC68340 (NM_198620.1,870-888).
gactcaatgctattgactt

SEQ ID NO: 813638 - DNA, 19 bp, Mus musculus
  siRNA target sequence for MGC68340 (NM_198620.1,928-946).
ccctgctgtgatagactat

SEQ ID NO: 813639 - DNA, 19 bp, Mus musculus
  siRNA target sequence for MGC68340 (NM_198620.1,937-955).
gatagactatacaccatat

SEQ ID NO: 813640 - DNA, 19 bp, Mus musculus
  siRNA target sequence for MGC68340 (NM_198620.1,1132-1150).
ggagcagaagggttatctt

SEQ ID NO: 813641 - DNA, 19 bp, Mus musculus
  siRNA target sequence for MGC68340 (NM_198620.1,1135-1153).
gcagaagggttatcttgaa

SEQ ID NO: 813642 - DNA, 19 bp, Mus musculus
  siRNA target sequence for MGC68340 (NM_198620.1,1138-1156).
gaagggttatcttgaagaa

SEQ ID NO: 813643 - DNA, 19 bp, Mus musculus
  siRNA target sequence for MGC68340 (NM_198620.1,1143-1161).
gttatcttgaagaactctt

SEQ ID NO: 813644 - DNA, 19 bp, Mus musculus
  siRNA target sequence for MGC68340 (NM_198620.1,1214-1232).
cttcagaggatcgaagatt

SEQ ID NO: 813645 - DNA, 19 bp, Mus musculus
  siRNA target sequence for MGC68340 (NM_198620.1,1219-1237).
gaggatcgaagattctgat

SEQ ID NO: 813646 - DNA, 19 bp, Mus musculus
  siRNA target sequence for MGC68340 (NM_198620.1,1259-1277).
gaacagttagaatatatca

SEQ ID NO: 813647 - DNA, 19 bp, Mus musculus
  siRNA target sequence for MGC68340 (NM_198620.1,1276-1294).
cattgtggagcttcaagat

SEQ ID NO: 813648 - DNA, 19 bp, Mus musculus
  siRNA target sequence for MGC68340 (NM_198620.1,1388-1406).
ggaaagcaagactcattga

SEQ ID NO: 813649 - DNA, 19 bp, Mus musculus
  siRNA target sequence for MGC68340 (NM_198620.1,1467-1485).
catcagtggcaagttacaa

SEQ ID NO: 813650 - DNA, 19 bp, Mus musculus
  siRNA target sequence for MGC58709 (NM_198621.1,251-269).
gagccatcatacatactga

SEQ ID NO: 813651 - DNA, 19 bp, Mus musculus
  siRNA target sequence for MGC58709 (NM_198621.1,300-318).
gtatcatccggtcttgtta

SEQ ID NO: 813652 - DNA, 19 bp, Mus musculus
  siRNA target sequence for MGC58709 (NM_198621.1,304-322).
catccggtcttgttatggt

SEQ ID NO: 813653 - DNA, 19 bp, Mus musculus
  siRNA target sequence for MGC58709 (NM_198621.1,349-367).
gactgccaagggagaaaca

SEQ ID NO: 813654 - DNA, 19 bp, Mus musculus
  siRNA target sequence for MGC58709 (NM_198621.1,420-438).
cagctgcccagtttgttca

SEQ ID NO: 813655 - DNA, 19 bp, Mus musculus
  siRNA target sequence for MGC58709 (NM_198621.1,426-444).
cccagtttgttcaagaatt

SEQ ID NO: 813656 - DNA, 19 bp, Mus musculus
  siRNA target sequence for MGC58709 (NM_198621.1,427-445).
ccagtttgttcaagaatta

SEQ ID NO: 813657 - DNA, 19 bp, Mus musculus
  siRNA target sequence for MGC58709 (NM_198621.1,471-489).
gggatggcacggtctttgt

SEQ ID NO: 813658 - DNA, 19 bp, Mus musculus
  siRNA target sequence for MGC58709 (NM_198621.1,477-495).
gcacggtctttgttgttct

SEQ ID NO: 813659 - DNA, 19 bp, Mus musculus
  siRNA target sequence for MGC58709 (NM_198621.1,478-496).
cacggtctttgttgttcta

SEQ ID NO: 813660 - DNA, 19 bp, Mus musculus
  siRNA target sequence for MGC58709 (NM_198621.1,480-498).
cggtctttgttgttctact

SEQ ID NO: 813661 - DNA, 19 bp, Mus musculus
  siRNA target sequence for MGC58709 (NM_198621.1,514-532).
ggagcaggcccattacctt

SEQ ID NO: 813662 - DNA, 19 bp, Mus musculus
  siRNA target sequence for MGC58709 (NM_198621.1,655-673).
ggccctctattctgtgata

SEQ ID NO: 813663 - DNA, 19 bp, Mus musculus
  siRNA target sequence for MGC58709 (NM_198621.1,656-674).
gccctctattctgtgataa

SEQ ID NO: 813664 - DNA, 19 bp, Mus musculus
  siRNA target sequence for MGC58709 (NM_198621.1,684-702).
ccctgtccaactcagatta

SEQ ID NO: 813665 - DNA, 19 bp, Mus musculus
  siRNA target sequence for MGC58709 (NM_198621.1,686-704).
ctgtccaactcagattatt

SEQ ID NO: 813666 - DNA, 19 bp, Mus musculus
  siRNA target sequence for MGC58709 (NM_198621.1,756-774).
gcttcaagcctgagagtat

SEQ ID NO: 813667 - DNA, 19 bp, Mus musculus
  siRNA target sequence for MGC58709 (NM_198621.1,757-775).
cttcaagcctgagagtatt

SEQ ID NO: 813668 - DNA, 19 bp, Mus musculus
  siRNA target sequence for MGC58709 (NM_198621.1,805-823).
gactgattcccgaattttt

SEQ ID NO: 813669 - DNA, 19 bp, Mus musculus
  siRNA target sequence for MGC58709 (NM_198621.1,882-900).
ctagggtggccctgttcaa

SEQ ID NO: 813670 - DNA, 19 bp, Mus musculus
  siRNA target sequence for MGC58709 (NM_198621.1,903-921).
gcccctttggtcctacaaa

SEQ ID NO: 813671 - DNA, 19 bp, Mus musculus
  siRNA target sequence for MGC58709 (NM_198621.1,951-969).
ccaacccggaagaactact

SEQ ID NO: 813672 - DNA, 19 bp, Mus musculus
  siRNA target sequence for MGC58709 (NM_198621.1,952-970).
caacccggaagaactacta

SEQ ID NO: 813673 - DNA, 19 bp, Mus musculus
  siRNA target sequence for MGC58709 (NM_198621.1,957-975).
cggaagaactactaagatt

SEQ ID NO: 813674 - DNA, 19 bp, Mus musculus
  siRNA target sequence for MGC58709 (NM_198621.1,958-976).
ggaagaactactaagattt

SEQ ID NO: 813675 - DNA, 19 bp, Mus musculus
  siRNA target sequence for MGC58709 (NM_198621.1,968-986).
ctaagatttcggaaacaaa

SEQ ID NO: 813676 - DNA, 19 bp, Mus musculus
  siRNA target sequence for MGC58709 (NM_198621.1,1043-1061).
gtggtcttgggggaagtta

SEQ ID NO: 813677 - DNA, 19 bp, Mus musculus
  siRNA target sequence for MGC58709 (NM_198621.1,1045-1063).
ggtcttgggggaagttaat

SEQ ID NO: 813678 - DNA, 19 bp, Mus musculus
  siRNA target sequence for MGC58709 (NM_198621.1,1052-1070).
ggggaagttaatgagaaat

SEQ ID NO: 813679 - DNA, 19 bp, Mus musculus
  siRNA target sequence for MGC58709 (NM_198621.1,1071-1089).
cggtggaccaggctaacta

SEQ ID NO: 813680 - DNA, 19 bp, Mus musculus
  siRNA target sequence for MGC58709 (NM_198621.1,1073-1091).
gtggaccaggctaactact

SEQ ID NO: 813681 - DNA, 19 bp, Mus musculus
  siRNA target sequence for MGC58709 (NM_198621.1,1196-1214).
gggaagtgccacaaggttt

SEQ ID NO: 813682 - DNA, 19 bp, Mus musculus
  siRNA target sequence for MGC58709 (NM_198621.1,1232-1250).
gatactgcggtggtaatgt

SEQ ID NO: 813683 - DNA, 19 bp, Mus musculus
  siRNA target sequence for MGC58709 (NM_198621.1,1409-1427).
gagatggctctggcaaaaa

SEQ ID NO: 813684 - DNA, 19 bp, Mus musculus
  siRNA target sequence for MGC58709 (NM_198621.1,1471-1489).
ggccttccaagcatttgct

SEQ ID NO: 813685 - DNA, 19 bp, Mus musculus
  siRNA target sequence for MGC58709 (NM_198621.1,1549-1567).
cgtgatggcagaattgagt

SEQ ID NO: 813686 - DNA, 19 bp, Mus musculus
  siRNA target sequence for MGC58709 (NM_198621.1,1555-1573).
ggcagaattgagtggattt

SEQ ID NO: 813687 - DNA, 19 bp, Mus musculus
  siRNA target sequence for MGC58709 (NM_198621.1,1557-1575).
cagaattgagtggatttca

SEQ ID NO: 813688 - DNA, 19 bp, Mus musculus
  siRNA target sequence for MGC58709 (NM_198621.1,1603-1621).
gggaacagacggcttagta

SEQ ID NO: 813689 - DNA, 19 bp, Mus musculus
  siRNA target sequence for MGC58709 (NM_198621.1,1604-1622).
ggaacagacggcttagtaa

SEQ ID NO: 813690 - DNA, 19 bp, Mus musculus
  siRNA target sequence for MGC58709 (NM_198621.1,1608-1626).
cagacggcttagtaaatgt

SEQ ID NO: 813691 - DNA, 19 bp, Mus musculus
  siRNA target sequence for MGC58709 (NM_198621.1,1705-1723).
ggtgactgtggaccaaatt

SEQ ID NO: 813692 - DNA, 19 bp, Mus musculus
  siRNA target sequence for MGC58709 (NM_198621.1,1708-1726).
gactgtggaccaaattata

SEQ ID NO: 813693 - DNA, 19 bp, Mus musculus
  siRNA target sequence for MGC58709 (NM_198621.1,1793-1811).
cccctgagagcaaaattct

SEQ ID NO: 813694 - DNA, 19 bp, Mus musculus
  siRNA target sequence for MGC58709 (NM_198621.1,1800-1818).
gagcaaaattctttggaaa

SEQ ID NO: 813695 - DNA, 19 bp, Mus musculus
  siRNA target sequence for H1fx (NM_198622.1,379-397).
cgcacctacctcaagtact

SEQ ID NO: 813696 - DNA, 19 bp, Mus musculus
  siRNA target sequence for H1fx (NM_198622.1,406-424).
gcgctggtgcagaacgata

SEQ ID NO: 813697 - DNA, 19 bp, Mus musculus
  siRNA target sequence for H1fx (NM_198622.1,625-643).
gccagcgcgaagaaagtga

SEQ ID NO: 813698 - DNA, 19 bp, Mus musculus
  siRNA target sequence for H1fx (NM_198622.1,626-644).
ccagcgcgaagaaagtgaa

SEQ ID NO: 813699 - DNA, 19 bp, Mus musculus
  siRNA target sequence for Ubqln3 (NM_198623.1,463-481).
ccctcagtcaagttctgtt

SEQ ID NO: 813700 - DNA, 19 bp, Mus musculus
  siRNA target sequence for Ubqln3 (NM_198623.1,595-613).
catctcagtgcctgaactt

SEQ ID NO: 813701 - DNA, 19 bp, Mus musculus
  siRNA target sequence for Ubqln3 (NM_198623.1,675-693).
gccagttggttcttgacaa

SEQ ID NO: 813702 - DNA, 19 bp, Mus musculus
  siRNA target sequence for Ubqln3 (NM_198623.1,765-783).
ggcagacaatggagtttct

SEQ ID NO: 813703 - DNA, 19 bp, Mus musculus
  siRNA target sequence for Ubqln3 (NM_198623.1,771-789).
caatggagtttcttcgtaa

SEQ ID NO: 813704 - DNA, 19 bp, Mus musculus
  siRNA target sequence for Ubqln3 (NM_198623.1,869-887).
gtgctccgtactatgtaca

SEQ ID NO: 813705 - DNA, 19 bp, Mus musculus
  siRNA target sequence for Ubqln3 (NM_198623.1,875-893).
cgtactatgtacacagata

SEQ ID NO: 813706 - DNA, 19 bp, Mus musculus
  siRNA target sequence for Ubqln3 (NM_198623.1,926-944).
caatttggtggcaatcctt

SEQ ID NO: 813707 - DNA, 19 bp, Mus musculus
  siRNA target sequence for Ubqln3 (NM_198623.1,989-1007).
ccatcaaggacagagaatt

SEQ ID NO: 813708 - DNA, 19 bp, Mus musculus
  siRNA target sequence for Ubqln3 (NM_198623.1,1088-1106).
gaccaggatgcatctgaaa

SEQ ID NO: 813709 - DNA, 19 bp, Mus musculus
  siRNA target sequence for Ubqln3 (NM_198623.1,1122-1140).
caagctttctgggtaacat

SEQ ID NO: 813710 - DNA, 19 bp, Mus musculus
  siRNA target sequence for Ubqln3 (NM_198623.1,1132-1150).
gggtaacataggactcttt

SEQ ID NO: 813711 - DNA, 19 bp, Mus musculus
  siRNA target sequence for Ubqln3 (NM_198623.1,1364-1382).
cactcaactgagaacagta

SEQ ID NO: 813712 - DNA, 19 bp, Mus musculus
  siRNA target sequence for Ubqln3 (NM_198623.1,1477-1495).
caacagatcctcgtttgtt

SEQ ID NO: 813713 - DNA, 19 bp, Mus musculus
  siRNA target sequence for Ubqln3 (NM_198623.1,1556-1574).
ccaacaggttactcaagat

SEQ ID NO: 813714 - DNA, 19 bp, Mus musculus
  siRNA target sequence for Ubqln3 (NM_198623.1,1579-1597).
gagatcagcgggcacaaat

SEQ ID NO: 813715 - DNA, 19 bp, Mus musculus
  siRNA target sequence for Ubqln3 (NM_198623.1,1581-1599).
gatcagcgggcacaaatca

SEQ ID NO: 813716 - DNA, 19 bp, Mus musculus
  siRNA target sequence for Ubqln3 (NM_198623.1,1584-1602).
cagcgggcacaaatcaagt

SEQ ID NO: 813717 - DNA, 19 bp, Mus musculus
  siRNA target sequence for Ubqln3 (NM_198623.1,1638-1656).
cactactgttgcatcttca

SEQ ID NO: 813718 - DNA, 19 bp, Mus musculus
  siRNA target sequence for Ubqln3 (NM_198623.1,1803-1821).
ctagagaaggtgttgttat

SEQ ID NO: 813719 - DNA, 19 bp, Mus musculus
  siRNA target sequence for Ubqln3 (NM_198623.1,1872-1890).
gttctacagagctaggtat

SEQ ID NO: 813720 - DNA, 19 bp, Mus musculus
  siRNA target sequence for Ubqln3 (NM_198623.1,1962-1980).
ctcacttccgggtacaact

SEQ ID NO: 813721 - DNA, 19 bp, Mus musculus
  siRNA target sequence for Ubqln3 (NM_198623.1,2024-2042).
ctccaggccctcattgcta

SEQ ID NO: 813722 - DNA, 19 bp, Mus musculus
  siRNA target sequence for Ubqln3 (NM_198623.1,2040-2058).
ctacagagggtgatgtaga

SEQ ID NO: 813723 - DNA, 19 bp, Mus musculus
  siRNA target sequence for LOC244179 (NM_198624.1,292-310).
gccccagagcaggtataca

SEQ ID NO: 813724 - DNA, 19 bp, Mus musculus
  siRNA target sequence for LOC244179 (NM_198624.1,345-363).
gtgtcattcgagtgattgt

SEQ ID NO: 813725 - DNA, 19 bp, Mus musculus
  siRNA target sequence for LOC244179 (NM_198624.1,347-365).
gtcattcgagtgattgtga

SEQ ID NO: 813726 - DNA, 19 bp, Mus musculus
  siRNA target sequence for LOC244179 (NM_198624.1,369-387).
ctccaggcaaccagatcat

SEQ ID NO: 813727 - DNA, 19 bp, Mus musculus
  siRNA target sequence for LOC244179 (NM_198624.1,434-452).
ctgtctgctcacttcaaat

SEQ ID NO: 813728 - DNA, 19 bp, Mus musculus
  siRNA target sequence for LOC244179 (NM_198624.1,464-482).
caactggtactggtcttta

SEQ ID NO: 813729 - DNA, 19 bp, Mus musculus
  siRNA target sequence for LOC244179 (NM_198624.1,579-597).
gatccctggctcactcttt

SEQ ID NO: 813730 - DNA, 19 bp, Mus musculus
  siRNA target sequence for LOC244179 (NM_198624.1,601-619).
gaacctggtaaccaacaat

SEQ ID NO: 813731 - DNA, 19 bp, Mus musculus
  siRNA target sequence for LOC244179 (NM_198624.1,748-766).
cccagaagtgggtagtcta

SEQ ID NO: 813732 - DNA, 19 bp, Mus musculus
  siRNA target sequence for LOC244179 (NM_198624.1,755-773).
gtgggtagtctagaacata

SEQ ID NO: 813733 - DNA, 19 bp, Mus musculus
  siRNA target sequence for LOC244179 (NM_198624.1,803-821).
cagagtctgctgtctaata

SEQ ID NO: 813734 - DNA, 19 bp, Mus musculus
  siRNA target sequence for LOC244179 (NM_198624.1,807-825).
gtctgctgtctaatatgga

SEQ ID NO: 813735 - DNA, 19 bp, Mus musculus
  siRNA target sequence for LOC244179 (NM_198624.1,846-864).
cagaacaaccatatatgga

SEQ ID NO: 813736 - DNA, 19 bp, Mus musculus
  siRNA target sequence for LOC244179 (NM_198624.1,855-873).
catatatggaagaactgat

SEQ ID NO: 813737 - DNA, 19 bp, Mus musculus
  siRNA target sequence for LOC244179 (NM_198624.1,905-923).
gacaattctgagatcctat

SEQ ID NO: 813738 - DNA, 19 bp, Mus musculus
  siRNA target sequence for LOC244179 (NM_198624.1,1021-1039).
gccattcttgggtttagaa

SEQ ID NO: 813739 - DNA, 19 bp, Mus musculus
  siRNA target sequence for LOC244179 (NM_198624.1,1022-1040).
ccattcttgggtttagaaa

SEQ ID NO: 813740 - DNA, 19 bp, Mus musculus
  siRNA target sequence for LOC244179 (NM_198624.1,1066-1084).
gggccagagttatgtcaat

SEQ ID NO: 813741 - DNA, 19 bp, Mus musculus
  siRNA target sequence for LOC244179 (NM_198624.1,1067-1085).
ggccagagttatgtcaata

SEQ ID NO: 813742 - DNA, 19 bp, Mus musculus
  siRNA target sequence for LOC244179 (NM_198624.1,1068-1086).
gccagagttatgtcaataa

SEQ ID NO: 813743 - DNA, 19 bp, Mus musculus
  siRNA target sequence for LOC244179 (NM_198624.1,1079-1097).
gtcaataacaacgatcata

SEQ ID NO: 813744 - DNA, 19 bp, Mus musculus
  siRNA target sequence for LOC244179 (NM_198624.1,1102-1120).
caatggtgtgcctgatctt

SEQ ID NO: 813745 - DNA, 19 bp, Mus musculus
  siRNA target sequence for LOC244179 (NM_198624.1,1172-1190).
gtccagactccttctctat

SEQ ID NO: 813746 - DNA, 19 bp, Mus musculus
  siRNA target sequence for LOC244179 (NM_198624.1,1177-1195).
gactccttctctatctcaa

SEQ ID NO: 813747 - DNA, 19 bp, Mus musculus
  siRNA target sequence for LOC244179 (NM_198624.1,1227-1245).
cttcttcccaagtaattta

SEQ ID NO: 813748 - DNA, 19 bp, Mus musculus
  siRNA target sequence for LOC244179 (NM_198624.1,1254-1272).
cttgtggattatcatcaat

SEQ ID NO: 813749 - DNA, 19 bp, Mus musculus
  siRNA target sequence for LOC244179 (NM_198624.1,1266-1284).
catcaatcaccccaacaaa

SEQ ID NO: 813750 - DNA, 19 bp, Mus musculus
  siRNA target sequence for LOC244179 (NM_198624.1,1318-1336).
ggaaaatccagccatagtt

SEQ ID NO: 813751 - DNA, 19 bp, Mus musculus
  siRNA target sequence for LOC244179 (NM_198624.1,1338-1356).
ccacccagggccaaagcaa

SEQ ID NO: 813752 - DNA, 19 bp, Mus musculus
  siRNA target sequence for LOC244179 (NM_198624.1,1415-1433).
cagaagcctcaagttgata

SEQ ID NO: 813753 - DNA, 19 bp, Mus musculus
  siRNA target sequence for LOC244179 (NM_198624.1,1420-1438).
gcctcaagttgataaggat

SEQ ID NO: 813754 - DNA, 19 bp, Mus musculus
  siRNA target sequence for LOC244179 (NM_198624.1,1421-1439).
cctcaagttgataaggata

SEQ ID NO: 813755 - DNA, 19 bp, Mus musculus
  siRNA target sequence for LOC244179 (NM_198624.1,1440-1458).
ctaccatcactctaggtat

SEQ ID NO: 813756 - DNA, 19 bp, Mus musculus
  siRNA target sequence for LOC244179 (NM_198624.1,1585-1603).
gaatacgtcccaactgaat

SEQ ID NO: 813757 - DNA, 19 bp, Mus musculus
  siRNA target sequence for LOC244179 (NM_198624.1,1648-1666).
gctccatgacttgctttta

SEQ ID NO: 813758 - DNA, 19 bp, Mus musculus
  siRNA target sequence for LOC244179 (NM_198624.1,1669-1687).
cctagccaaccccaaaaca

SEQ ID NO: 813759 - DNA, 19 bp, Mus musculus
  siRNA target sequence for LOC244179 (NM_198624.1,1686-1704).
catcacaagcattattaca

SEQ ID NO: 813760 - DNA, 19 bp, Mus musculus
  siRNA target sequence for LOC244179 (NM_198624.1,1746-1764).
cccttttgccctacattga

SEQ ID NO: 813761 - DNA, 19 bp, Mus musculus
  siRNA target sequence for LOC244179 (NM_198624.1,1747-1765).
ccttttgccctacattgaa

SEQ ID NO: 813762 - DNA, 19 bp, Mus musculus
  siRNA target sequence for LOC244179 (NM_198624.1,1756-1774).
ctacattgaaccttaccta

SEQ ID NO: 813763 - DNA, 19 bp, Mus musculus
  siRNA target sequence for LOC244179 (NM_198624.1,1777-1795).
gggtctaggttggcttatt

SEQ ID NO: 813764 - DNA, 19 bp, Mus musculus
  siRNA target sequence for LOC244179 (NM_198624.1,1833-1851).
cctggaatgtgcaagacat

SEQ ID NO: 813765 - DNA, 19 bp, Mus musculus
  siRNA target sequence for LOC244179 (NM_198624.1,1868-1886).
cctgaaagctgccacaaat

SEQ ID NO: 813766 - DNA, 19 bp, Mus musculus
  siRNA target sequence for LOC244179 (NM_198624.1,1988-2006).
gccatgggatttgtgaatt

SEQ ID NO: 813767 - DNA, 19 bp, Mus musculus
  siRNA target sequence for LOC244179 (NM_198624.1,2018-2036).
ctgcaagcgctcatagcta

SEQ ID NO: 813768 - DNA, 19 bp, Mus musculus
  siRNA target sequence for LOC244179 (NM_198624.1,2034-2052).
ctactgatggtgacactaa

SEQ ID NO: 813769 - DNA, 19 bp, Mus musculus
  siRNA target sequence for MGC79213 (NM_198625.1,607-625).
ggaccatgcgaaagagtat

SEQ ID NO: 813770 - DNA, 19 bp, Mus musculus
  siRNA target sequence for MGC79213 (NM_198625.1,608-626).
gaccatgcgaaagagtata

SEQ ID NO: 813771 - DNA, 19 bp, Mus musculus
  siRNA target sequence for MGC79213 (NM_198625.1,610-628).
ccatgcgaaagagtataaa

SEQ ID NO: 813772 - DNA, 19 bp, Mus musculus
  siRNA target sequence for MGC79213 (NM_198625.1,952-970).
cagtgagcaggtgatcaaa

SEQ ID NO: 813773 - DNA, 19 bp, Mus musculus
  siRNA target sequence for MGC79213 (NM_198625.1,954-972).
gtgagcaggtgatcaaaga

SEQ ID NO: 813774 - DNA, 19 bp, Mus musculus
  siRNA target sequence for MGC79213 (NM_198625.1,1166-1184).
gacatcaccagccagaaat

SEQ ID NO: 813775 - DNA, 19 bp, Mus musculus
  siRNA target sequence for MGC79213 (NM_198625.1,1520-1538).
gactcgctgcagtattcca

SEQ ID NO: 813776 - DNA, 19 bp, Mus musculus
  siRNA target sequence for MGC79213 (NM_198625.1,1651-1669).
ccctgagttcgacaaatca

SEQ ID NO: 813777 - DNA, 19 bp, Mus musculus
  siRNA target sequence for MGC79213 (NM_198625.1,1652-1670).
cctgagttcgacaaatcat

SEQ ID NO: 813778 - DNA, 19 bp, Mus musculus
  siRNA target sequence for MGC79213 (NM_198625.1,1655-1673).
gagttcgacaaatcatcta

SEQ ID NO: 813779 - DNA, 19 bp, Mus musculus
  siRNA target sequence for MGC79213 (NM_198625.1,1689-1707).
gcaacatagcccagaacta

SEQ ID NO: 813780 - DNA, 19 bp, Mus musculus
  siRNA target sequence for MGC79213 (NM_198625.1,1962-1980).
gtgaggagtgcgtcttcta

SEQ ID NO: 813781 - DNA, 19 bp, Mus musculus
  siRNA target sequence for MGC79213 (NM_198625.1,1964-1982).
gaggagtgcgtcttctaca

SEQ ID NO: 813782 - DNA, 19 bp, Mus musculus
  siRNA target sequence for AI480653 (NM_198626.1,145-163).
gcggtgtgcgccttctact

SEQ ID NO: 813783 - DNA, 19 bp, Mus musculus
  siRNA target sequence for AI480653 (NM_198626.1,146-164).
cggtgtgcgccttctacta

SEQ ID NO: 813784 - DNA, 19 bp, Mus musculus
  siRNA target sequence for AI480653 (NM_198626.1,562-580).
gttgctgtgctgacagata

SEQ ID NO: 813785 - DNA, 19 bp, Mus musculus
  siRNA target sequence for AI480653 (NM_198626.1,566-584).
ctgtgctgacagataagct

SEQ ID NO: 813786 - DNA, 19 bp, Mus musculus
  siRNA target sequence for AI480653 (NM_198626.1,625-643).
ggctcggggacctactaca

SEQ ID NO: 813787 - DNA, 19 bp, Mus musculus
  siRNA target sequence for AI480653 (NM_198626.1,721-739).
cttgacctgaagtataaga

SEQ ID NO: 813788 - DNA, 19 bp, Mus musculus
  siRNA target sequence for AI480653 (NM_198626.1,839-857).
ggcagttccgccatgagaa

SEQ ID NO: 813789 - DNA, 19 bp, Mus musculus
  siRNA target sequence for MGC67359 (NM_198627.1,204-222).
ggacaggcgaggatgtaga

SEQ ID NO: 813790 - DNA, 19 bp, Mus musculus
  siRNA target sequence for MGC67359 (NM_198627.1,207-225).
caggcgaggatgtagagat

SEQ ID NO: 813791 - DNA, 19 bp, Mus musculus
  siRNA target sequence for MGC67359 (NM_198627.1,243-261).
gcagtggttccccatcata

SEQ ID NO: 813792 - DNA, 19 bp, Mus musculus
  siRNA target sequence for MGC67359 (NM_198627.1,512-530).
cgtgtgctttgcttgctta

SEQ ID NO: 813793 - DNA, 19 bp, Mus musculus
  siRNA target sequence for MGC67359 (NM_198627.1,606-624).
cgctcctgttcctcatcat

SEQ ID NO: 813794 - DNA, 19 bp, Mus musculus
  siRNA target sequence for MGC58758 (NM_198628.1,340-358).
ggagaataagaggaagtta

SEQ ID NO: 813795 - DNA, 19 bp, Mus musculus
  siRNA target sequence for MGC58758 (NM_198628.1,371-389).
gacactgagtggatgcata

SEQ ID NO: 813796 - DNA, 19 bp, Mus musculus
  siRNA target sequence for MGC58758 (NM_198628.1,375-393).
ctgagtggatgcataccat

SEQ ID NO: 813797 - DNA, 19 bp, Mus musculus
  siRNA target sequence for MGC58758 (NM_198628.1,390-408).
ccatgctaagccaggtatt

SEQ ID NO: 813798 - DNA, 19 bp, Mus musculus
  siRNA target sequence for MGC58758 (NM_198628.1,394-412).
gctaagccaggtattggat

SEQ ID NO: 813799 - DNA, 19 bp, Mus musculus
  siRNA target sequence for MGC58758 (NM_198628.1,465-483).
ccaacatcgtccttgttaa

SEQ ID NO: 813800 - DNA, 19 bp, Mus musculus
  siRNA target sequence for MGC58758 (NM_198628.1,590-608).
gctcctgaagctctcaaat

SEQ ID NO: 813801 - DNA, 19 bp, Mus musculus
  siRNA target sequence for MGC58758 (NM_198628.1,593-611).
cctgaagctctcaaattct

SEQ ID NO: 813802 - DNA, 19 bp, Mus musculus
  siRNA target sequence for MGC58758 (NM_198628.1,645-663).
gctgcatcattctagacat

SEQ ID NO: 813803 - DNA, 19 bp, Mus musculus
  siRNA target sequence for MGC58758 (NM_198628.1,777-795).
ctggtacagatgtctacta

SEQ ID NO: 813804 - DNA, 19 bp, Mus musculus
  siRNA target sequence for MGC58758 (NM_198628.1,779-797).
ggtacagatgtctactatt

SEQ ID NO: 813805 - DNA, 19 bp, Mus musculus
  siRNA target sequence for MGC58758 (NM_198628.1,780-798).
gtacagatgtctactattt

SEQ ID NO: 813806 - DNA, 19 bp, Mus musculus
  siRNA target sequence for MGC58758 (NM_198628.1,831-849).
ccgatcgactggcaatcaa

SEQ ID NO: 813807 - DNA, 19 bp, Mus musculus
  siRNA target sequence for MGC58758 (NM_198628.1,894-912).
cctctgttgcgctgaatat

SEQ ID NO: 813808 - DNA, 19 bp, Mus musculus
  siRNA target sequence for MGC58758 (NM_198628.1,980-998).
gatgtcatgcagaatttct

SEQ ID NO: 813809 - DNA, 19 bp, Mus musculus
  siRNA target sequence for MGC58758 (NM_198628.1,1016-1034).
cagctcagagccattaaca

SEQ ID NO: 813810 - DNA, 19 bp, Mus musculus
  siRNA target sequence for MGC58758 (NM_198628.1,1023-1041).
gagccattaacaagttgtt

SEQ ID NO: 813811 - DNA, 19 bp, Mus musculus
  siRNA target sequence for MGC58758 (NM_198628.1,1025-1043).
gccattaacaagttgttga

SEQ ID NO: 813812 - DNA, 19 bp, Mus musculus
  siRNA target sequence for MGC58758 (NM_198628.1,1094-1112).
gaggtgatcagcatcataa

SEQ ID NO: 813813 - DNA, 19 bp, Mus musculus
  siRNA target sequence for MGC58758 (NM_198628.1,1248-1266).
ccttgcggagccatcctaa

SEQ ID NO: 813814 - DNA, 19 bp, Mus musculus
  siRNA target sequence for MGC58758 (NM_198628.1,1267-1285).
ctctgaaaggcttgttaat

SEQ ID NO: 813815 - DNA, 19 bp, Mus musculus
  siRNA target sequence for MGC58758 (NM_198628.1,1572-1590).
ccttgttgggctgcataaa

SEQ ID NO: 813816 - DNA, 19 bp, Mus musculus
  siRNA target sequence for MGC58758 (NM_198628.1,1714-1732).
ggtggccttccgaatagta

SEQ ID NO: 813817 - DNA, 19 bp, Mus musculus
  siRNA target sequence for MGC58758 (NM_198628.1,1717-1735).
ggccttccgaatagtagta

SEQ ID NO: 813818 - DNA, 19 bp, Mus musculus
  siRNA target sequence for MGC58758 (NM_198628.1,1719-1737).
ccttccgaatagtagtact

SEQ ID NO: 813819 - DNA, 19 bp, Mus musculus
  siRNA target sequence for MGC58758 (NM_198628.1,1760-1778).
cacctcatccaagatatct

SEQ ID NO: 813820 - DNA, 19 bp, Mus musculus
  siRNA target sequence for MGC58758 (NM_198628.1,1763-1781).
ctcatccaagatatctaca

SEQ ID NO: 813821 - DNA, 19 bp, Mus musculus
  siRNA target sequence for MGC58758 (NM_198628.1,1926-1944).
gcctggagctgatttctta

SEQ ID NO: 813822 - DNA, 19 bp, Mus musculus
  siRNA target sequence for MGC58758 (NM_198628.1,1941-1959).
cttacgctgatgagatact

SEQ ID NO: 813823 - DNA, 19 bp, Mus musculus
  siRNA target sequence for MGC58758 (NM_198628.1,1963-1981).
ggtactggaagcaaatgca

SEQ ID NO: 813824 - DNA, 19 bp, Mus musculus
  siRNA target sequence for LOC328644 (NM_198629.1,1939-1957).
ctgaggcctcagaaggaat

SEQ ID NO: 813825 - DNA, 19 bp, Mus musculus
  siRNA target sequence for LOC328644 (NM_198629.1,2057-2075).
ggaactgacagcttccaaa

SEQ ID NO: 813826 - DNA, 19 bp, Mus musculus
  siRNA target sequence for LOC328644 (NM_198629.1,2102-2120).
cctgccagacggacttgat

SEQ ID NO: 813827 - DNA, 19 bp, Mus musculus
  siRNA target sequence for 1810024B03Rik (NM_198630.1,352-370).
ctctacaccaccgtcatat

SEQ ID NO: 813828 - DNA, 19 bp, Mus musculus
  siRNA target sequence for 1810024B03Rik (NM_198630.1,354-372).
ctacaccaccgtcatatat

SEQ ID NO: 813829 - DNA, 19 bp, Mus musculus
  siRNA target sequence for 1810024B03Rik (NM_198630.1,436-454).
ggggatccctgctgaaata

SEQ ID NO: 813830 - DNA, 19 bp, Mus musculus
  siRNA target sequence for 1810024B03Rik (NM_198630.1,439-457).
gatccctgctgaaatacat

SEQ ID NO: 813831 - DNA, 19 bp, Mus musculus
  siRNA target sequence for 1810024B03Rik (NM_198630.1,512-530).
ctctttggctgtcaactat

SEQ ID NO: 813832 - DNA, 19 bp, Mus musculus
  siRNA target sequence for 1810024B03Rik (NM_198630.1,527-545).
ctatatccacagtcagaat

SEQ ID NO: 813833 - DNA, 19 bp, Mus musculus
  siRNA target sequence for 1810024B03Rik (NM_198630.1,570-588).
gagaacatcctattggatt

SEQ ID NO: 813834 - DNA, 19 bp, Mus musculus
  siRNA target sequence for 1810024B03Rik (NM_198630.1,589-607).
gggatggccatgtaaaact

SEQ ID NO: 813835 - DNA, 19 bp, Mus musculus
  siRNA target sequence for 1810024B03Rik (NM_198630.1,591-609).
gatggccatgtaaaactca

SEQ ID NO: 813836 - DNA, 19 bp, Mus musculus
  siRNA target sequence for 1810024B03Rik (NM_198630.1,637-655).
cctctggggagaaattcaa

SEQ ID NO: 813837 - DNA, 19 bp, Mus musculus
  siRNA target sequence for 1810024B03Rik (NM_198630.1,682-700).
gtgctcctgaagtgttcaa

SEQ ID NO: 813838 - DNA, 19 bp, Mus musculus
  siRNA target sequence for 1810024B03Rik (NM_198630.1,685-703).
ctcctgaagtgttcaatga

SEQ ID NO: 813839 - DNA, 19 bp, Mus musculus
  siRNA target sequence for 1810024B03Rik (NM_198630.1,698-716).
caatgacacacaatatggt

SEQ ID NO: 813840 - DNA, 19 bp, Mus musculus
  siRNA target sequence for 1810024B03Rik (NM_198630.1,717-735).
ggccttccaagcgacatat

SEQ ID NO: 813841 - DNA, 19 bp, Mus musculus
  siRNA target sequence for 1810024B03Rik (NM_198630.1,720-738).
cttccaagcgacatatgga

SEQ ID NO: 813842 - DNA, 19 bp, Mus musculus
  siRNA target sequence for 1810024B03Rik (NM_198630.1,736-754).
ggagtcttggaatggtatt

SEQ ID NO: 813843 - DNA, 19 bp, Mus musculus
  siRNA target sequence for 1810024B03Rik (NM_198630.1,737-755).
gagtcttggaatggtatta

SEQ ID NO: 813844 - DNA, 19 bp, Mus musculus
  siRNA target sequence for 1810024B03Rik (NM_198630.1,739-757).
gtcttggaatggtattata

SEQ ID NO: 813845 - DNA, 19 bp, Mus musculus
  siRNA target sequence for 1810024B03Rik (NM_198630.1,741-759).
cttggaatggtattatact

SEQ ID NO: 813846 - DNA, 19 bp, Mus musculus
  siRNA target sequence for 1810024B03Rik (NM_198630.1,762-780).
cggccaccttccctttcaa

SEQ ID NO: 813847 - DNA, 19 bp, Mus musculus
  siRNA target sequence for 1810024B03Rik (NM_198630.1,785-803).
caacgcactccaacataaa

SEQ ID NO: 813848 - DNA, 19 bp, Mus musculus
  siRNA target sequence for 1810024B03Rik (NM_198630.1,788-806).
cgcactccaacataaagta

SEQ ID NO: 813849 - DNA, 19 bp, Mus musculus
  siRNA target sequence for 1810024B03Rik (NM_198630.1,790-808).
cactccaacataaagtaca

SEQ ID NO: 813850 - DNA, 19 bp, Mus musculus
  siRNA target sequence for 1810024B03Rik (NM_198630.1,794-812).
ccaacataaagtacatgat

SEQ ID NO: 813851 - DNA, 19 bp, Mus musculus
  siRNA target sequence for 1810024B03Rik (NM_198630.1,795-813).
caacataaagtacatgata

SEQ ID NO: 813852 - DNA, 19 bp, Mus musculus
  siRNA target sequence for 1810024B03Rik (NM_198630.1,853-871).
gagctttgagacctaatga

SEQ ID NO: 813853 - DNA, 19 bp, Mus musculus
  siRNA target sequence for 1810024B03Rik (NM_198630.1,860-878).
gagacctaatgatgagatt

SEQ ID NO: 813854 - DNA, 19 bp, Mus musculus
  siRNA target sequence for 1810024B03Rik (NM_198630.1,900-918).
gaggccatccatcaaagaa

SEQ ID NO: 813855 - DNA, 19 bp, Mus musculus
  siRNA target sequence for LOC330863 (NM_198632.1,1542-1560).
caatgcgacgtgctctatt

SEQ ID NO: 813856 - DNA, 19 bp, Mus musculus
  siRNA target sequence for LOC330863 (NM_198632.1,1606-1624).
ctaagcatcggctagttca

SEQ ID NO: 813857 - DNA, 19 bp, Mus musculus
  siRNA target sequence for LOC330863 (NM_198632.1,1652-1670).
ggctacccctgctgttaca

SEQ ID NO: 813858 - DNA, 19 bp, Mus musculus
  siRNA target sequence for LOC330863 (NM_198632.1,2079-2097).
catctacccacatgttcat

SEQ ID NO: 813859 - DNA, 19 bp, Mus musculus
  siRNA target sequence for LOC330863 (NM_198632.1,2095-2113).
catcattccatcgatctat

SEQ ID NO: 813860 - DNA, 19 bp, Mus musculus
  siRNA target sequence for LOC330863 (NM_198632.1,2203-2221).
gcatacatctgtctatcat

SEQ ID NO: 813861 - DNA, 19 bp, Mus musculus
  siRNA target sequence for LOC330863 (NM_198632.1,2213-2231).
gtctatcatggatctatat

SEQ ID NO: 813862 - DNA, 19 bp, Mus musculus
  siRNA target sequence for LOC330863 (NM_198632.1,2325-2343).
ctctgcactgggtatcaga

SEQ ID NO: 813863 - DNA, 19 bp, Mus musculus
  siRNA target sequence for LOC330863 (NM_198632.1,2336-2354).
gtatcagattggtaggtta

SEQ ID NO: 813864 - DNA, 19 bp, Mus musculus
  siRNA target sequence for LOC331392 (NM_198633.1,944-962).
cggaaaaaacccatgaaga

SEQ ID NO: 813865 - DNA, 19 bp, Mus musculus
  siRNA target sequence for LOC331392 (NM_198633.1,1082-1100).
gatgagtcagattcaagtt

SEQ ID NO: 813866 - DNA, 19 bp, Mus musculus
  siRNA target sequence for LOC331392 (NM_198633.1,1466-1484).
ctgagcaggactgttttgt

SEQ ID NO: 813867 - DNA, 19 bp, Mus musculus
  siRNA target sequence for MGC67569 (NM_198634.1,287-305).
ctcacggatctgcaagaat

SEQ ID NO: 813868 - DNA, 19 bp, Mus musculus
  siRNA target sequence for MGC67569 (NM_198634.1,289-307).
cacggatctgcaagaataa

SEQ ID NO: 813869 - DNA, 19 bp, Mus musculus
  siRNA target sequence for MGC67569 (NM_198634.1,359-377).
gcggaagcgtgaatccaaa

SEQ ID NO: 813870 - DNA, 19 bp, Mus musculus
  siRNA target sequence for MGC67569 (NM_198634.1,360-378).
cggaagcgtgaatccaaat

SEQ ID NO: 813871 - DNA, 19 bp, Mus musculus
  siRNA target sequence for MGC67569 (NM_198634.1,361-379).
ggaagcgtgaatccaaata

SEQ ID NO: 813872 - DNA, 19 bp, Mus musculus
  siRNA target sequence for MGC67569 (NM_198634.1,365-383).
gcgtgaatccaaatacagt

SEQ ID NO: 813873 - DNA, 19 bp, Mus musculus
  siRNA target sequence for MGC67569 (NM_198634.1,497-515).
ggatttcgtgcctagcatt

SEQ ID NO: 813874 - DNA, 19 bp, Mus musculus
  siRNA target sequence for MGC67569 (NM_198634.1,529-547).
gctggaaacgtcgaaacaa

SEQ ID NO: 813875 - DNA, 19 bp, Mus musculus
  siRNA target sequence for MGC67569 (NM_198634.1,532-550).
ggaaacgtcgaaacaatgt

SEQ ID NO: 813876 - DNA, 19 bp, Mus musculus
  siRNA target sequence for MGC67569 (NM_198634.1,627-645).
cagccacctctttctctta

SEQ ID NO: 813877 - DNA, 19 bp, Mus musculus
  siRNA target sequence for MGC67569 (NM_198634.1,678-696).
gctgaagtacccttgttgt

SEQ ID NO: 813878 - DNA, 19 bp, Mus musculus
  siRNA target sequence for MGC67569 (NM_198634.1,679-697).
ctgaagtacccttgttgta

SEQ ID NO: 813879 - DNA, 19 bp, Mus musculus
  siRNA target sequence for MGC67569 (NM_198634.1,707-725).
gcctggcagagtgtttgaa

SEQ ID NO: 813880 - DNA, 19 bp, Mus musculus
  siRNA target sequence for MGC67569 (NM_198634.1,712-730).
gcagagtgtttgaatgtga

SEQ ID NO: 813881 - DNA, 19 bp, Mus musculus
  siRNA target sequence for MGC67569 (NM_198634.1,727-745).
gtgatcggttgcaagtact

SEQ ID NO: 813882 - DNA, 19 bp, Mus musculus
  siRNA target sequence for MGC67569 (NM_198634.1,732-750).
cggttgcaagtactgttat

SEQ ID NO: 813883 - DNA, 19 bp, Mus musculus
  siRNA target sequence for MGC67569 (NM_198634.1,734-752).
gttgcaagtactgttatgt

SEQ ID NO: 813884 - DNA, 19 bp, Mus musculus
  siRNA target sequence for MGC67569 (NM_198634.1,841-859).
cactgcctacctcttatca

SEQ ID NO: 813885 - DNA, 19 bp, Mus musculus
  siRNA target sequence for MGC67569 (NM_198634.1,1203-1221).
gtacctcgccagctcattt

SEQ ID NO: 813886 - DNA, 19 bp, Mus musculus
  siRNA target sequence for MGC67569 (NM_198634.1,1206-1224).
cctcgccagctcattttga

SEQ ID NO: 813887 - DNA, 19 bp, Mus musculus
  siRNA target sequence for LOC333669 (NM_198635.1,211-229).
ggctttggcgccatgttct

SEQ ID NO: 813888 - DNA, 19 bp, Mus musculus
  siRNA target sequence for LOC333669 (NM_198635.1,218-236).
gcgccatgttcttgaaaat

SEQ ID NO: 813889 - DNA, 19 bp, Mus musculus
  siRNA target sequence for LOC333669 (NM_198635.1,237-255).
ggtttgggacactgatatt

SEQ ID NO: 813890 - DNA, 19 bp, Mus musculus
  siRNA target sequence for LOC333669 (NM_198635.1,279-297).
gacgatcatcggcatgtat

SEQ ID NO: 813891 - DNA, 19 bp, Mus musculus
  siRNA target sequence for LOC333669 (NM_198635.1,315-333).
ggccactgtggcttacgtt

SEQ ID NO: 813892 - DNA, 19 bp, Mus musculus
  siRNA target sequence for LOC333669 (NM_198635.1,343-361).
caagctggtatcatgattt

SEQ ID NO: 813893 - DNA, 19 bp, Mus musculus
  siRNA target sequence for LOC333669 (NM_198635.1,655-673).
gaaggtggctgcctattgt

SEQ ID NO: 813894 - DNA, 19 bp, Mus musculus
  siRNA target sequence for LOC333669 (NM_198635.1,666-684).
cctattgtgcggctactta

SEQ ID NO: 813895 - DNA, 19 bp, Mus musculus
  siRNA target sequence for LOC333669 (NM_198635.1,667-685).
ctattgtgcggctacttaa

SEQ ID NO: 813896 - DNA, 19 bp, Mus musculus
  siRNA target sequence for LOC333669 (NM_198635.1,719-737).
gcatgatcagccgtatctt

SEQ ID NO: 813897 - DNA, 19 bp, Mus musculus
  siRNA target sequence for LOC333669 (NM_198635.1,767-785).
cttcggaatgccagaagtt

SEQ ID NO: 813898 - DNA, 19 bp, Mus musculus
  siRNA target sequence for LOC333669 (NM_198635.1,899-917).
cttccttgacgtctatttt

SEQ ID NO: 813899 - DNA, 19 bp, Mus musculus
  siRNA target sequence for LOC333669 (NM_198635.1,934-952).
ctgttcacgctgaacattt

SEQ ID NO: 813900 - DNA, 19 bp, Mus musculus
  siRNA target sequence for LOC333669 (NM_198635.1,936-954).
gttcacgctgaacatttat

SEQ ID NO: 813901 - DNA, 19 bp, Mus musculus
  siRNA target sequence for LOC333669 (NM_198635.1,1009-1027).
ctctacaggctgtatttga

SEQ ID NO: 813902 - DNA, 19 bp, Mus musculus
  siRNA target sequence for LOC380660 (NM_198636.1,101-119).
gttgcaatgtcgcaaagta

SEQ ID NO: 813903 - DNA, 19 bp, Mus musculus
  siRNA target sequence for LOC380660 (NM_198636.1,279-297).
gtggctgaccccgaaagat

SEQ ID NO: 813904 - DNA, 19 bp, Mus musculus
  siRNA target sequence for LOC380660 (NM_198636.1,282-300).
gctgaccccgaaagattct

SEQ ID NO: 813905 - DNA, 19 bp, Mus musculus
  siRNA target sequence for LOC380660 (NM_198636.1,335-353).
gccctggaccaaaactcta

SEQ ID NO: 813906 - DNA, 19 bp, Mus musculus
  siRNA target sequence for LOC380660 (NM_198636.1,444-462).
caaggggataagattgcta

SEQ ID NO: 813907 - DNA, 19 bp, Mus musculus
  siRNA target sequence for LOC380660 (NM_198636.1,450-468).
gataagattgctatcatct

SEQ ID NO: 813908 - DNA, 19 bp, Mus musculus
  siRNA target sequence for LOC380660 (NM_198636.1,486-504).
gacaccaaagcaactatct

SEQ ID NO: 813909 - DNA, 19 bp, Mus musculus
  siRNA target sequence for LOC380660 (NM_198636.1,496-514).
caactatctcctataagga

SEQ ID NO: 813910 - DNA, 19 bp, Mus musculus
  siRNA target sequence for LOC380660 (NM_198636.1,574-592).
gcgatacagtggtcatcta

SEQ ID NO: 813911 - DNA, 19 bp, Mus musculus
  siRNA target sequence for LOC380660 (NM_198636.1,575-593).
cgatacagtggtcatctat

SEQ ID NO: 813912 - DNA, 19 bp, Mus musculus
  siRNA target sequence for LOC380660 (NM_198636.1,602-620).
gatcccacaagcaatatat

SEQ ID NO: 813913 - DNA, 19 bp, Mus musculus
  siRNA target sequence for LOC380660 (NM_198636.1,606-624).
ccacaagcaatatatacca

SEQ ID NO: 813914 - DNA, 19 bp, Mus musculus
  siRNA target sequence for LOC380660 (NM_198636.1,607-625).
cacaagcaatatataccat

SEQ ID NO: 813915 - DNA, 19 bp, Mus musculus
  siRNA target sequence for LOC380660 (NM_198636.1,626-644).
gctggcgtgtgcaaggata

SEQ ID NO: 813916 - DNA, 19 bp, Mus musculus
  siRNA target sequence for LOC380660 (NM_198636.1,648-666).
gcaatccacagtctcatat

SEQ ID NO: 813917 - DNA, 19 bp, Mus musculus
  siRNA target sequence for LOC380660 (NM_198636.1,649-667).
caatccacagtctcatatt

SEQ ID NO: 813918 - DNA, 19 bp, Mus musculus
  siRNA target sequence for LOC380660 (NM_198636.1,725-743).
ggttgttacggcatcattt

SEQ ID NO: 813919 - DNA, 19 bp, Mus musculus
  siRNA target sequence for LOC380660 (NM_198636.1,767-785).
ggagtacatcccacttcta

SEQ ID NO: 813920 - DNA, 19 bp, Mus musculus
  siRNA target sequence for LOC380660 (NM_198636.1,866-884).
gatgtcaggtcgtgatctt

SEQ ID NO: 813921 - DNA, 19 bp, Mus musculus
  siRNA target sequence for LOC380660 (NM_198636.1,869-887).
gtcaggtcgtgatcttgat

SEQ ID NO: 813922 - DNA, 19 bp, Mus musculus
  siRNA target sequence for LOC380660 (NM_198636.1,962-980).
ctacacatctggaacaact

SEQ ID NO: 813923 - DNA, 19 bp, Mus musculus
  siRNA target sequence for LOC380660 (NM_198636.1,1028-1046).
gttgaactggacaatgtct

SEQ ID NO: 813924 - DNA, 19 bp, Mus musculus
  siRNA target sequence for LOC380660 (NM_198636.1,1102-1120).
gggttgttggacattccta

SEQ ID NO: 813925 - DNA, 19 bp, Mus musculus
  siRNA target sequence for LOC380660 (NM_198636.1,1111-1129).
gacattcctatatttgcta

SEQ ID NO: 813926 - DNA, 19 bp, Mus musculus
  siRNA target sequence for LOC380660 (NM_198636.1,1188-1206).
ccggatgctggcgcttatt

SEQ ID NO: 813927 - DNA, 19 bp, Mus musculus
  siRNA target sequence for LOC380660 (NM_198636.1,1189-1207).
cggatgctggcgcttattt

SEQ ID NO: 813928 - DNA, 19 bp, Mus musculus
  siRNA target sequence for LOC380660 (NM_198636.1,1227-1245).
ggagtggctgccttgttta

SEQ ID NO: 813929 - DNA, 19 bp, Mus musculus
  siRNA target sequence for LOC380660 (NM_198636.1,1321-1339).
ggttcaagacactgtttgt

SEQ ID NO: 813930 - DNA, 19 bp, Mus musculus
  siRNA target sequence for LOC380660 (NM_198636.1,1322-1340).
gttcaagacactgtttgta

SEQ ID NO: 813931 - DNA, 19 bp, Mus musculus
  siRNA target sequence for LOC380660 (NM_198636.1,1366-1384).
ccctagaatggtccaaaaa

SEQ ID NO: 813932 - DNA, 19 bp, Mus musculus
  siRNA target sequence for LOC380660 (NM_198636.1,1367-1385).
cctagaatggtccaaaaaa

SEQ ID NO: 813933 - DNA, 19 bp, Mus musculus
  siRNA target sequence for LOC380660 (NM_198636.1,1371-1389).
gaatggtccaaaaaagtct

SEQ ID NO: 813934 - DNA, 19 bp, Mus musculus
  siRNA target sequence for LOC380660 (NM_198636.1,1450-1468).
catgtattggattaggtaa

SEQ ID NO: 813935 - DNA, 19 bp, Mus musculus
  siRNA target sequence for LOC380660 (NM_198636.1,1458-1476).
ggattaggtaactccaaaa

SEQ ID NO: 813936 - DNA, 19 bp, Mus musculus
  siRNA target sequence for MGC58818 (NM_198637.1,283-301).
gcaagggcgacgcagataa

SEQ ID NO: 813937 - DNA, 19 bp, Mus musculus
  siRNA target sequence for MGC58818 (NM_198637.1,284-302).
caagggcgacgcagataaa

SEQ ID NO: 813938 - DNA, 19 bp, Mus musculus
  siRNA target sequence for MGC58818 (NM_198637.1,287-305).
gggcgacgcagataaacat

SEQ ID NO: 813939 - DNA, 19 bp, Mus musculus
  siRNA target sequence for MGC58818 (NM_198637.1,289-307).
gcgacgcagataaacatca

SEQ ID NO: 813940 - DNA, 19 bp, Mus musculus
  siRNA target sequence for MGC58818 (NM_198637.1,308-326).
cagtcgagggcggaagaat

SEQ ID NO: 813941 - DNA, 19 bp, Mus musculus
  siRNA target sequence for MGC58818 (NM_198637.1,310-328).
gtcgagggcggaagaatca

SEQ ID NO: 813942 - DNA, 19 bp, Mus musculus
  siRNA target sequence for MGC58818 (NM_198637.1,340-358).
catctttccatgacatctt

SEQ ID NO: 813943 - DNA, 19 bp, Mus musculus
  siRNA target sequence for MGC58818 (NM_198637.1,417-435).
caaacccttccctattcgt

SEQ ID NO: 813944 - DNA, 19 bp, Mus musculus
  siRNA target sequence for MGC58818 (NM_198637.1,426-444).
ccctattcgtacagcatta

SEQ ID NO: 813945 - DNA, 19 bp, Mus musculus
  siRNA target sequence for MGC58818 (NM_198637.1,451-469).
cctgctttgccgaaataga

SEQ ID NO: 813946 - DNA, 19 bp, Mus musculus
  siRNA target sequence for MGC58818 (NM_198637.1,452-470).
ctgctttgccgaaatagaa

SEQ ID NO: 813947 - DNA, 19 bp, Mus musculus
  siRNA target sequence for MGC58818 (NM_198637.1,454-472).
gctttgccgaaatagaaga

SEQ ID NO: 813948 - DNA, 19 bp, Mus musculus
  siRNA target sequence for MGC58818 (NM_198637.1,504-522).
cgttgggatgggattctca

SEQ ID NO: 813949 - DNA, 19 bp, Mus musculus
  siRNA target sequence for MGC58818 (NM_198637.1,543-561).
gaaaggatccgcatctaca

SEQ ID NO: 813950 - DNA, 19 bp, Mus musculus
  siRNA target sequence for MGC58818 (NM_198637.1,594-612).
gccctcaagtgcttccatt

SEQ ID NO: 813951 - DNA, 19 bp, Mus musculus
  siRNA target sequence for MGC58818 (NM_198637.1,703-721).
gcgaccacgcgcatagcta

SEQ ID NO: 813952 - DNA, 19 bp, Mus musculus
  siRNA target sequence for MGC58818 (NM_198637.1,707-725).
ccacgcgcatagctacttt

SEQ ID NO: 813953 - DNA, 19 bp, Mus musculus
  siRNA target sequence for LOC380767 (NM_198638.1,257-275).
catgtgtacctcaactaca

SEQ ID NO: 813954 - DNA, 19 bp, Mus musculus
  siRNA target sequence for LOC380767 (NM_198638.1,417-435).
ggccccagaaaagaaatta

SEQ ID NO: 813955 - DNA, 19 bp, Mus musculus
  siRNA target sequence for LOC380767 (NM_198638.1,443-461).
cagctatccggagaaaact

SEQ ID NO: 813956 - DNA, 19 bp, Mus musculus
  siRNA target sequence for LOC380767 (NM_198638.1,1075-1093).
ccagcccacgcgtggaaaa

SEQ ID NO: 813957 - DNA, 19 bp, Mus musculus
  siRNA target sequence for LOC380767 (NM_198638.1,1076-1094).
cagcccacgcgtggaaaat

SEQ ID NO: 813958 - DNA, 19 bp, Mus musculus
  siRNA target sequence for LOC380767 (NM_198638.1,1255-1273).
cactgccagagccttgaat

SEQ ID NO: 813959 - DNA, 19 bp, Mus musculus
  siRNA target sequence for LOC380767 (NM_198638.1,1257-1275).
ctgccagagccttgaatca

SEQ ID NO: 813960 - DNA, 19 bp, Mus musculus
  siRNA target sequence for LOC380767 (NM_198638.1,1358-1376).
gggctcacttggaagtctt

SEQ ID NO: 813961 - DNA, 19 bp, Mus musculus
  siRNA target sequence for LOC380767 (NM_198638.1,1397-1415).
gcagcaacctcataccaaa

SEQ ID NO: 813962 - DNA, 19 bp, Mus musculus
  siRNA target sequence for LOC380767 (NM_198638.1,1638-1656).
catgaagtatgcagtctat

SEQ ID NO: 813963 - DNA, 19 bp, Mus musculus
  siRNA target sequence for LOC380767 (NM_198638.1,1763-1781).
caggtgcttcacatctctt

SEQ ID NO: 813964 - DNA, 19 bp, Mus musculus
  siRNA target sequence for LOC380767 (NM_198638.1,1794-1812).
ggccaggtgccgacagtat

SEQ ID NO: 813965 - DNA, 19 bp, Mus musculus
  siRNA target sequence for LOC380767 (NM_198638.1,1795-1813).
gccaggtgccgacagtatt

SEQ ID NO: 813966 - DNA, 19 bp, Mus musculus
  siRNA target sequence for LOC380767 (NM_198638.1,1796-1814).
ccaggtgccgacagtattt

SEQ ID NO: 813967 - DNA, 19 bp, Mus musculus
  siRNA target sequence for LOC380767 (NM_198638.1,1799-1817).
ggtgccgacagtatttaca

SEQ ID NO: 813968 - DNA, 19 bp, Mus musculus
  siRNA target sequence for LOC380767 (NM_198638.1,2102-2120).
ctcacaagcacagcttttt

SEQ ID NO: 813969 - DNA, 19 bp, Mus musculus
  siRNA target sequence for LOC380767 (NM_198638.1,2122-2140).
gatctgaagcactttacta

SEQ ID NO: 813970 - DNA, 19 bp, Mus musculus
  siRNA target sequence for LOC380767 (NM_198638.1,2138-2156).
ctagtggcgtgaatggatt

SEQ ID NO: 813971 - DNA, 19 bp, Mus musculus
  siRNA target sequence for LOC380767 (NM_198638.1,2153-2171).
gattcctggccgatgagtt

SEQ ID NO: 813972 - DNA, 19 bp, Mus musculus
  siRNA target sequence for LOC380767 (NM_198638.1,2300-2318).
gcctgcacaggttctcaaa

SEQ ID NO: 813973 - DNA, 19 bp, Mus musculus
  siRNA target sequence for LOC380767 (NM_198638.1,2331-2349).
ggcacagtggcggtacaaa

SEQ ID NO: 813974 - DNA, 19 bp, Mus musculus
  siRNA target sequence for LOC380767 (NM_198638.1,2333-2351).
cacagtggcggtacaaagt

SEQ ID NO: 813975 - DNA, 19 bp, Mus musculus
  siRNA target sequence for LOC380767 (NM_198638.1,2490-2508).
cctggaagggacaagtagt

SEQ ID NO: 813976 - DNA, 19 bp, Mus musculus
  siRNA target sequence for LOC380767 (NM_198638.1,2600-2618).
cgatcatccccatgatgtt

SEQ ID NO: 813977 - DNA, 19 bp, Mus musculus
  siRNA target sequence for LOC380767 (NM_198638.1,2675-2693).
cccatcaggtggtactcat

SEQ ID NO: 813978 - DNA, 19 bp, Mus musculus
  siRNA target sequence for LOC380767 (NM_198638.1,2733-2751).
gttcgtagagcgataccaa

SEQ ID NO: 813979 - DNA, 19 bp, Mus musculus
  siRNA target sequence for LOC380767 (NM_198638.1,2876-2894).
cggcagcagggatggtatt

SEQ ID NO: 813980 - DNA, 19 bp, Mus musculus
  siRNA target sequence for LOC380767 (NM_198638.1,2878-2896).
gcagcagggatggtatttt

SEQ ID NO: 813981 - DNA, 19 bp, Mus musculus
  siRNA target sequence for LOC380767 (NM_198638.1,2951-2969).
ccacgctccaggaggattt

SEQ ID NO: 813982 - DNA, 19 bp, Mus musculus
  siRNA target sequence for LOC380767 (NM_198638.1,2952-2970).
cacgctccaggaggatttt

SEQ ID NO: 813983 - DNA, 19 bp, Mus musculus
  siRNA target sequence for LOC380767 (NM_198638.1,2956-2974).
ctccaggaggatttttgga

SEQ ID NO: 813984 - DNA, 19 bp, Mus musculus
  siRNA target sequence for LOC380767 (NM_198638.1,2958-2976).
ccaggaggatttttggata

SEQ ID NO: 813985 - DNA, 19 bp, Mus musculus
  siRNA target sequence for LOC380767 (NM_198638.1,3089-3107).
cctgcaaacagctcttaga

SEQ ID NO: 813986 - DNA, 19 bp, Mus musculus
  siRNA target sequence for LOC380767 (NM_198638.1,3093-3111).
caaacagctcttagaaaca

SEQ ID NO: 813987 - DNA, 19 bp, Mus musculus
  siRNA target sequence for LOC380767 (NM_198638.1,3184-3202).
ggtatgcgaggttttccat

SEQ ID NO: 813988 - DNA, 19 bp, Mus musculus
  siRNA target sequence for LOC380767 (NM_198638.1,3185-3203).
gtatgcgaggttttccatt

SEQ ID NO: 813989 - DNA, 19 bp, Mus musculus
  siRNA target sequence for LOC380767 (NM_198638.1,3205-3223).
gtccttcagcaaattagta

SEQ ID NO: 813990 - DNA, 19 bp, Mus musculus
  siRNA target sequence for LOC380767 (NM_198638.1,3231-3249).
cagttacccacttatgcaa

SEQ ID NO: 813991 - DNA, 19 bp, Mus musculus
  siRNA target sequence for LOC380767 (NM_198638.1,3506-3524).
ccgtgcacatccaaagtca

SEQ ID NO: 813992 - DNA, 19 bp, Mus musculus
  siRNA target sequence for LOC380767 (NM_198638.1,3639-3657).
gagctccgaccctgatcat

SEQ ID NO: 813993 - DNA, 19 bp, Mus musculus
  siRNA target sequence for LOC380767 (NM_198638.1,3641-3659).
gctccgaccctgatcatgt

SEQ ID NO: 813994 - DNA, 19 bp, Mus musculus
  siRNA target sequence for MGC68300 (NM_198640.1,556-574).
ccctgagccggtaactgta

SEQ ID NO: 813995 - DNA, 19 bp, Mus musculus
  siRNA target sequence for MGC68300 (NM_198640.1,557-575).
cctgagccggtaactgtaa

SEQ ID NO: 813996 - DNA, 19 bp, Mus musculus
  siRNA target sequence for MGC68300 (NM_198640.1,558-576).
ctgagccggtaactgtaaa

SEQ ID NO: 813997 - DNA, 19 bp, Mus musculus
  siRNA target sequence for MGC68300 (NM_198640.1,560-578).
gagccggtaactgtaaaat

SEQ ID NO: 813998 - DNA, 19 bp, Mus musculus
  siRNA target sequence for MGC68300 (NM_198640.1,563-581).
ccggtaactgtaaaatgga

SEQ ID NO: 813999 - DNA, 19 bp, Mus musculus
  siRNA target sequence for MGC68300 (NM_198640.1,564-582).
cggtaactgtaaaatggaa

SEQ ID NO: 814000 - DNA, 19 bp, Mus musculus
  siRNA target sequence for MGC68300 (NM_198640.1,742-760).
gagaatcgagcctagaata

SEQ ID NO: 814001 - DNA, 19 bp, Mus musculus
  siRNA target sequence for MGC68300 (NM_198640.1,792-810).
gcccacctggtaacatctt

SEQ ID NO: 814002 - DNA, 19 bp, Mus musculus
  siRNA target sequence for MGC68300 (NM_198640.1,978-996).
cccgtgaagctcagtacaa

SEQ ID NO: 814003 - DNA, 19 bp, Mus musculus
  siRNA target sequence for MGC68300 (NM_198640.1,980-998).
cgtgaagctcagtacaaca

SEQ ID NO: 814004 - DNA, 19 bp, Mus musculus
  siRNA target sequence for MGC68300 (NM_198640.1,983-1001).
gaagctcagtacaacagta

SEQ ID NO: 814005 - DNA, 19 bp, Mus musculus
  siRNA target sequence for MGC68300 (NM_198640.1,1133-1151).
gcccagacacctcaagtat

SEQ ID NO: 814006 - DNA, 19 bp, Mus musculus
  siRNA target sequence for MGC68300 (NM_198640.1,1134-1152).
cccagacacctcaagtata

SEQ ID NO: 814007 - DNA, 19 bp, Mus musculus
  siRNA target sequence for MGC68300 (NM_198640.1,1136-1154).
cagacacctcaagtataca

SEQ ID NO: 814008 - DNA, 19 bp, Mus musculus
  siRNA target sequence for MGC68300 (NM_198640.1,1163-1181).
ccacctcgtgaacaaatgt

SEQ ID NO: 814009 - DNA, 19 bp, Mus musculus
  siRNA target sequence for MGC68300 (NM_198640.1,1429-1447).
gtctcgctcccctggtaaa

SEQ ID NO: 814010 - DNA, 19 bp, Mus musculus
  siRNA target sequence for 5031414D18 (NM_198642.1,497-515).
cccttgcgcctttcgatat

SEQ ID NO: 814011 - DNA, 19 bp, Mus musculus
  siRNA target sequence for 5031414D18 (NM_198642.1,498-516).
ccttgcgcctttcgatatt

SEQ ID NO: 814012 - DNA, 19 bp, Mus musculus
  siRNA target sequence for 5031414D18 (NM_198642.1,863-881).
gctgcagacatcattatct

SEQ ID NO: 814013 - DNA, 19 bp, Mus musculus
  siRNA target sequence for 5031414D18 (NM_198642.1,869-887).
gacatcattatctcagtaa

SEQ ID NO: 814014 - DNA, 19 bp, Mus musculus
  siRNA target sequence for 5031414D18 (NM_198642.1,901-919).
gtgcaacctcccgaatcaa

SEQ ID NO: 814015 - DNA, 19 bp, Mus musculus
  siRNA target sequence for 5031414D18 (NM_198642.1,965-983).
gggactggagcggaaatga

SEQ ID NO: 814016 - DNA, 19 bp, Mus musculus
  siRNA target sequence for 5031414D18 (NM_198642.1,972-990).
gagcggaaatgacctttta

SEQ ID NO: 814017 - DNA, 19 bp, Mus musculus
  siRNA target sequence for 5031414D18 (NM_198642.1,982-1000).
gaccttttatacccatata

SEQ ID NO: 814018 - DNA, 19 bp, Mus musculus
  siRNA target sequence for 5031414D18 (NM_198642.1,984-1002).
ccttttatacccatataaa

SEQ ID NO: 814019 - DNA, 19 bp, Mus musculus
  siRNA target sequence for 5031414D18 (NM_198642.1,1107-1125).
gagaggcctgcaaacatga

SEQ ID NO: 814020 - DNA, 19 bp, Mus musculus
  siRNA target sequence for 5031414D18 (NM_198642.1,1129-1147).
gaacaagttggtcatgtta

SEQ ID NO: 814021 - DNA, 19 bp, Mus musculus
  siRNA target sequence for 5031414D18 (NM_198642.1,1151-1169).
cttgggaaatataatgaca

SEQ ID NO: 814022 - DNA, 19 bp, Mus musculus
  siRNA target sequence for 5031414D18 (NM_198642.1,1209-1227).
gtgcgacctgcgagtcaaa

SEQ ID NO: 814023 - DNA, 19 bp, Mus musculus
  siRNA target sequence for 5031414D18 (NM_198642.1,1284-1302).
ggatgctgtcagaagttaa

SEQ ID NO: 814024 - DNA, 19 bp, Mus musculus
  siRNA target sequence for 5031414D18 (NM_198642.1,1341-1359).
gagtcggggatgaagaata

SEQ ID NO: 814025 - DNA, 19 bp, Mus musculus
  siRNA target sequence for 5031414D18 (NM_198642.1,1345-1363).
cggggatgaagaatatgct

SEQ ID NO: 814026 - DNA, 19 bp, Mus musculus
  siRNA target sequence for 5031414D18 (NM_198642.1,1399-1417).
ggaagtcatgcttaagtct

SEQ ID NO: 814027 - DNA, 19 bp, Mus musculus
  siRNA target sequence for 5031414D18 (NM_198642.1,1400-1418).
gaagtcatgcttaagtcta

SEQ ID NO: 814028 - DNA, 19 bp, Mus musculus
  siRNA target sequence for 5031414D18 (NM_198642.1,1447-1465).
ccctcgatgccaaatcata

SEQ ID NO: 814029 - DNA, 19 bp, Mus musculus
  siRNA target sequence for 5031414D18 (NM_198642.1,1530-1548).
gatgtgggactccaataca

SEQ ID NO: 814030 - DNA, 19 bp, Mus musculus
  siRNA target sequence for 5031414D18 (NM_198642.1,1580-1598).
gagtatctcgggaagtact

SEQ ID NO: 814031 - DNA, 19 bp, Mus musculus
  siRNA target sequence for 5031414D18 (NM_198642.1,1675-1693).
ccaagtcagcgatttctct

SEQ ID NO: 814032 - DNA, 19 bp, Mus musculus
  siRNA target sequence for 5031414D18 (NM_198642.1,1676-1694).
caagtcagcgatttctcta

SEQ ID NO: 814033 - DNA, 19 bp, Mus musculus
  siRNA target sequence for 5031414D18 (NM_198642.1,1679-1697).
gtcagcgatttctctaaat

SEQ ID NO: 814034 - DNA, 19 bp, Mus musculus
  siRNA target sequence for 5031414D18 (NM_198642.1,1716-1734).
ggcatcaacctgtcttcaa

SEQ ID NO: 814035 - DNA, 19 bp, Mus musculus
  siRNA target sequence for 5031414D18 (NM_198642.1,1755-1773).
gcctctatgcaaaagctaa

SEQ ID NO: 814036 - DNA, 19 bp, Mus musculus
  siRNA target sequence for 5031414D18 (NM_198642.1,1882-1900).
cagccacttgactgatgaa

SEQ ID NO: 814037 - DNA, 19 bp, Mus musculus
  siRNA target sequence for 5031414D18 (NM_198642.1,1895-1913).
gatgaatgccacatattct

SEQ ID NO: 814038 - DNA, 19 bp, Mus musculus
  siRNA target sequence for 5031414D18 (NM_198642.1,1946-1964).
ctgttggcacctttgctta

SEQ ID NO: 814039 - DNA, 19 bp, Mus musculus
  siRNA target sequence for 5031414D18 (NM_198642.1,2072-2090).
cagaccacgacttgtagaa

SEQ ID NO: 814040 - DNA, 19 bp, Mus musculus
  siRNA target sequence for 5031414D18 (NM_198642.1,2074-2092).
gaccacgacttgtagaaga

SEQ ID NO: 814041 - DNA, 19 bp, Mus musculus
  siRNA target sequence for 5031414D18 (NM_198642.1,2077-2095).
cacgacttgtagaagatgt

SEQ ID NO: 814042 - DNA, 19 bp, Mus musculus
  siRNA target sequence for 5031414D18 (NM_198642.1,2104-2122).
cagggcctgctttcacaaa

SEQ ID NO: 814043 - DNA, 19 bp, Mus musculus
  siRNA target sequence for 5031414D18 (NM_198642.1,2106-2124).
gggcctgctttcacaaaca

SEQ ID NO: 814044 - DNA, 19 bp, Mus musculus
  siRNA target sequence for 5031414D18 (NM_198642.1,2108-2126).
gcctgctttcacaaacagt

SEQ ID NO: 814045 - DNA, 19 bp, Mus musculus
  siRNA target sequence for LOC380950 (NM_198643.1,328-346).
ggacatgataacgttgaat

SEQ ID NO: 814046 - DNA, 19 bp, Mus musculus
  siRNA target sequence for LOC380950 (NM_198643.1,361-379).
ctgcacagtgacagcatta

SEQ ID NO: 814047 - DNA, 19 bp, Mus musculus
  siRNA target sequence for LOC380950 (NM_198643.1,439-457).
ggttgggaagtggattata

SEQ ID NO: 814048 - DNA, 19 bp, Mus musculus
  siRNA target sequence for LOC380950 (NM_198643.1,440-458).
gttgggaagtggattataa

SEQ ID NO: 814049 - DNA, 19 bp, Mus musculus
  siRNA target sequence for LOC380950 (NM_198643.1,448-466).
gtggattataaatgaaaca

SEQ ID NO: 814050 - DNA, 19 bp, Mus musculus
  siRNA target sequence for LOC380950 (NM_198643.1,499-517).
cacacttcctcgagatgaa

SEQ ID NO: 814051 - DNA, 19 bp, Mus musculus
  siRNA target sequence for LOC380950 (NM_198643.1,501-519).
cacttcctcgagatgaaca

SEQ ID NO: 814052 - DNA, 19 bp, Mus musculus
  siRNA target sequence for LOC380950 (NM_198643.1,521-539).
cagaagacatgcagtgtat

SEQ ID NO: 814053 - DNA, 19 bp, Mus musculus
  siRNA target sequence for LOC380950 (NM_198643.1,547-565).
cagttgtttagaattgtct

SEQ ID NO: 814054 - DNA, 19 bp, Mus musculus
  siRNA target sequence for LOC380950 (NM_198643.1,674-692).
gtgactctgcatcaaatca

SEQ ID NO: 814055 - DNA, 19 bp, Mus musculus
  siRNA target sequence for LOC380950 (NM_198643.1,708-726).
ctgcgacaccacatgtgtt

SEQ ID NO: 814056 - DNA, 19 bp, Mus musculus
  siRNA target sequence for LOC380950 (NM_198643.1,710-728).
gcgacaccacatgtgttat

SEQ ID NO: 814057 - DNA, 19 bp, Mus musculus
  siRNA target sequence for MGC56951 (NM_198644.1,170-188).
gcggacggcagaaaacaca

SEQ ID NO: 814058 - DNA, 19 bp, Mus musculus
  siRNA target sequence for MGC56951 (NM_198644.1,200-218).
gtgtaaatgctgtaatctt

SEQ ID NO: 814059 - DNA, 19 bp, Mus musculus
  siRNA target sequence for MGC56951 (NM_198644.1,351-369).
ggagatgagtttttggtta

SEQ ID NO: 814060 - DNA, 19 bp, Mus musculus
  siRNA target sequence for MGC56951 (NM_198644.1,354-372).
gatgagtttttggttatga

SEQ ID NO: 814061 - DNA, 19 bp, Mus musculus
  siRNA target sequence for MGC56951 (NM_198644.1,391-409).
ctaagggttccacaaagaa

SEQ ID NO: 814062 - DNA, 19 bp, Mus musculus
  siRNA target sequence for MGC56951 (NM_198644.1,568-586).
gcatcattgtgctgaatct

SEQ ID NO: 814063 - DNA, 19 bp, Mus musculus
  siRNA target sequence for MGC56951 (NM_198644.1,593-611).
cgagtcagaccttgatcta

SEQ ID NO: 814064 - DNA, 19 bp, Mus musculus
  siRNA target sequence for MGC56951 (NM_198644.1,596-614).
gtcagaccttgatctagaa

SEQ ID NO: 814065 - DNA, 19 bp, Mus musculus
  siRNA target sequence for MGC56951 (NM_198644.1,636-654).
cgagaaaaggcttcaaaaa

SEQ ID NO: 814066 - DNA, 19 bp, Mus musculus
  siRNA target sequence for MGC56951 (NM_198644.1,713-731).
gctttctggagcgaagaaa

SEQ ID NO: 814067 - DNA, 19 bp, Mus musculus
  siRNA target sequence for MGC56951 (NM_198644.1,723-741).
gcgaagaaacccatcatca

SEQ ID NO: 814068 - DNA, 19 bp, Mus musculus
  siRNA target sequence for MGC56951 (NM_198644.1,771-789).
ccaggtgctaccaagatta

SEQ ID NO: 814069 - DNA, 19 bp, Mus musculus
  siRNA target sequence for MGC56951 (NM_198644.1,772-790).
caggtgctaccaagattat

SEQ ID NO: 814070 - DNA, 19 bp, Mus musculus
  siRNA target sequence for MGC56951 (NM_198644.1,861-879).
cggagagggtaccaagaat

SEQ ID NO: 814071 - DNA, 19 bp, Mus musculus
  siRNA target sequence for MGC56951 (NM_198644.1,1308-1326).
gagctccgcctcatgacaa

SEQ ID NO: 814072 - DNA, 19 bp, Mus musculus
  siRNA target sequence for MGC56951 (NM_198644.1,1495-1513).
gaaagcacccctttgtgta

SEQ ID NO: 814073 - DNA, 19 bp, Mus musculus
  siRNA target sequence for MGC56951 (NM_198644.1,1521-1539).
gctctatgtctcaagaagt

SEQ ID NO: 814074 - DNA, 19 bp, Mus musculus
  siRNA target sequence for MGC56951 (NM_198644.1,1522-1540).
ctctatgtctcaagaagtt

SEQ ID NO: 814075 - DNA, 19 bp, Mus musculus
  siRNA target sequence for MGC56951 (NM_198644.1,1615-1633).
gctccatcaaccagagttt

SEQ ID NO: 814076 - DNA, 19 bp, Mus musculus
  siRNA target sequence for MGC56951 (NM_198644.1,1695-1713).
gcagctgaggaatttgtgt

SEQ ID NO: 814077 - DNA, 19 bp, Mus musculus
  siRNA target sequence for MGC56951 (NM_198644.1,1712-1730).
gtgtccagaaattgatgta

SEQ ID NO: 814078 - DNA, 19 bp, Mus musculus
  siRNA target sequence for MGC56951 (NM_198644.1,1832-1850).
caccccccagagtgaaagt

SEQ ID NO: 814079 - DNA, 19 bp, Mus musculus
  siRNA target sequence for MGC56951 (NM_198644.1,1835-1853).
cccccagagtgaaagtagt

SEQ ID NO: 814080 - DNA, 19 bp, Mus musculus
  siRNA target sequence for MGC56951 (NM_198644.1,1911-1929).
ggagtggtttcagatgatt

SEQ ID NO: 814081 - DNA, 19 bp, Mus musculus
  siRNA target sequence for MGC56951 (NM_198644.1,1921-1939).
cagatgattttttactgaa

SEQ ID NO: 814082 - DNA, 19 bp, Mus musculus
  siRNA target sequence for MGC56951 (NM_198644.1,1923-1941).
gatgattttttactgaaaa

SEQ ID NO: 814083 - DNA, 19 bp, Mus musculus
  siRNA target sequence for MGC56951 (NM_198644.1,2303-2321).
gatgaacaccagtctttgt

SEQ ID NO: 814084 - DNA, 19 bp, Mus musculus
  siRNA target sequence for MGC56951 (NM_198644.1,2322-2340).
gagcggatccggaaggttt

SEQ ID NO: 814085 - DNA, 19 bp, Mus musculus
  siRNA target sequence for MGC56951 (NM_198644.1,2365-2383).
gcggcaaacttttttggta

SEQ ID NO: 814086 - DNA, 19 bp, Mus musculus
  siRNA target sequence for MGC56951 (NM_198644.1,2380-2398).
ggtaccaggtgcattttga

SEQ ID NO: 814087 - DNA, 19 bp, Mus musculus
  siRNA target sequence for MGC56951 (NM_198644.1,2417-2435).
cacccgggaacatctgtat

SEQ ID NO: 814088 - DNA, 19 bp, Mus musculus
  siRNA target sequence for MGC56951 (NM_198644.1,2476-2494).
gccttaaacgccatgtaat

SEQ ID NO: 814089 - DNA, 19 bp, Mus musculus
  siRNA target sequence for MGC56951 (NM_198644.1,2496-2514).
cagaaacacagtaacatct

SEQ ID NO: 814090 - DNA, 19 bp, Mus musculus
  siRNA target sequence for MGC56951 (NM_198644.1,2543-2561).
ctactcgactccagataaa

SEQ ID NO: 814091 - DNA, 19 bp, Mus musculus
  siRNA target sequence for MGC56951 (NM_198644.1,2546-2564).
ctcgactccagataaatat

SEQ ID NO: 814092 - DNA, 19 bp, Mus musculus
  siRNA target sequence for MGC56951 (NM_198644.1,2548-2566).
cgactccagataaatataa

SEQ ID NO: 814093 - DNA, 19 bp, Mus musculus
  siRNA target sequence for MGC56951 (NM_198644.1,2551-2569).
ctccagataaatataagct

SEQ ID NO: 814094 - DNA, 19 bp, Mus musculus
  siRNA target sequence for MGC56951 (NM_198644.1,2600-2618).
ggacaaaaggagttattct

SEQ ID NO: 814095 - DNA, 19 bp, Mus musculus
  siRNA target sequence for MGC56951 (NM_198644.1,2601-2619).
gacaaaaggagttattctt

SEQ ID NO: 814096 - DNA, 19 bp, Mus musculus
  siRNA target sequence for MGC56951 (NM_198644.1,2644-2662).
cagaagaccgattgataaa

SEQ ID NO: 814097 - DNA, 19 bp, Mus musculus
  siRNA target sequence for MGC56951 (NM_198644.1,2646-2664).
gaagaccgattgataaagt

SEQ ID NO: 814098 - DNA, 19 bp, Mus musculus
  siRNA target sequence for MGC56951 (NM_198644.1,2652-2670).
cgattgataaagtcacata

SEQ ID NO: 814099 - DNA, 19 bp, Mus musculus
  siRNA target sequence for MGC56951 (NM_198644.1,2665-2683).
cacatatcaagactaatca

SEQ ID NO: 814100 - DNA, 19 bp, Mus musculus
  siRNA target sequence for MGC56951 (NM_198644.1,2690-2708).
ggtctccatgaataccatt

SEQ ID NO: 814101 - DNA, 19 bp, Mus musculus
  siRNA target sequence for MGC56951 (NM_198644.1,2695-2713).
ccatgaataccatttctga

SEQ ID NO: 814102 - DNA, 19 bp, Mus musculus
  siRNA target sequence for MGC56951 (NM_198644.1,2735-2753).
gctcaaagggctaattgga

SEQ ID NO: 814103 - DNA, 19 bp, Mus musculus
  siRNA target sequence for MGC56951 (NM_198644.1,2736-2754).
ctcaaagggctaattggaa

SEQ ID NO: 814104 - DNA, 19 bp, Mus musculus
  siRNA target sequence for MGC56951 (NM_198644.1,2751-2769).
ggaaagcgagccatgaagt

SEQ ID NO: 814105 - DNA, 19 bp, Mus musculus
  siRNA target sequence for MGC56951 (NM_198644.1,2760-2778).
gccatgaagtgtccatatt

SEQ ID NO: 814106 - DNA, 19 bp, Mus musculus
  siRNA target sequence for MGC56951 (NM_198644.1,2765-2783).
gaagtgtccatattgtgat

SEQ ID NO: 814107 - DNA, 19 bp, Mus musculus
  siRNA target sequence for MGC56951 (NM_198644.1,2770-2788).
gtccatattgtgatttcta

SEQ ID NO: 814108 - DNA, 19 bp, Mus musculus
  siRNA target sequence for MGC56951 (NM_198644.1,2855-2873).
gtgttctctgtgtgaatat

SEQ ID NO: 814109 - DNA, 19 bp, Mus musculus
  siRNA target sequence for MGC56951 (NM_198644.1,2977-2995).
cactgaaaagtcataagct

SEQ ID NO: 814110 - DNA, 19 bp, Mus musculus
  siRNA target sequence for MGC56951 (NM_198644.1,3004-3022).
cgtctgatgggaagcaatt

SEQ ID NO: 814111 - DNA, 19 bp, Mus musculus
  siRNA target sequence for MGC56951 (NM_198644.1,3108-3126).
cgctgtgctcactgtcatt

SEQ ID NO: 814112 - DNA, 19 bp, Mus musculus
  siRNA target sequence for MGC56951 (NM_198644.1,3109-3127).
gctgtgctcactgtcatta

SEQ ID NO: 814113 - DNA, 19 bp, Mus musculus
  siRNA target sequence for MGC56951 (NM_198644.1,3114-3132).
gctcactgtcattactctt

SEQ ID NO: 814114 - DNA, 19 bp, Mus musculus
  siRNA target sequence for MGC56951 (NM_198644.1,3117-3135).
cactgtcattactcttgta

SEQ ID NO: 814115 - DNA, 19 bp, Mus musculus
  siRNA target sequence for MGC56951 (NM_198644.1,3121-3139).
gtcattactcttgtaacat

SEQ ID NO: 814116 - DNA, 19 bp, Mus musculus
  siRNA target sequence for MGC56951 (NM_198644.1,3277-3295).
gaaccaaatgggagttcaa

SEQ ID NO: 814117 - DNA, 19 bp, Mus musculus
  siRNA target sequence for MGC56951 (NM_198644.1,3418-3436).
cacttcaggacctgagata

SEQ ID NO: 814118 - DNA, 19 bp, Mus musculus
  siRNA target sequence for MGC56951 (NM_198644.1,3558-3576).
ggcacagtgactgttgtaa

SEQ ID NO: 814119 - DNA, 19 bp, Mus musculus
  siRNA target sequence for MGC56951 (NM_198644.1,3742-3760).
cagagttcatcgtatacgt

SEQ ID NO: 814120 - DNA, 19 bp, Mus musculus
  siRNA target sequence for MGC36453 (NM_198645.1,441-459).
cgccgagttccaggaatta

SEQ ID NO: 814121 - DNA, 19 bp, Mus musculus
  siRNA target sequence for MGC36453 (NM_198645.1,445-463).
gagttccaggaattactca

SEQ ID NO: 814122 - DNA, 19 bp, Mus musculus
  siRNA target sequence for MGC36453 (NM_198645.1,462-480).
caaggtgatgaggacaatt

SEQ ID NO: 814123 - DNA, 19 bp, Mus musculus
  siRNA target sequence for MGC36453 (NM_198645.1,484-502).
gacagaatagtacatgaat

SEQ ID NO: 814124 - DNA, 19 bp, Mus musculus
  siRNA target sequence for MGC36453 (NM_198645.1,488-506).
gaatagtacatgaattaaa

SEQ ID NO: 814125 - DNA, 19 bp, Mus musculus
  siRNA target sequence for MGC36453 (NM_198645.1,527-545).
cctttgcagggaaaatcga

SEQ ID NO: 814126 - DNA, 19 bp, Mus musculus
  siRNA target sequence for MGC36453 (NM_198645.1,528-546).
ctttgcagggaaaatcgat

SEQ ID NO: 814127 - DNA, 19 bp, Mus musculus
  siRNA target sequence for MGC36453 (NM_198645.1,595-613).
gtcagtagggacagagtta

SEQ ID NO: 814128 - DNA, 19 bp, Mus musculus
  siRNA target sequence for MGC36453 (NM_198645.1,597-615).
cagtagggacagagttata

SEQ ID NO: 814129 - DNA, 19 bp, Mus musculus
  siRNA target sequence for MGC36453 (NM_198645.1,599-617).
gtagggacagagttataaa

SEQ ID NO: 814130 - DNA, 19 bp, Mus musculus
  siRNA target sequence for MGC36453 (NM_198645.1,630-648).
ccagacctcagcagtagta

SEQ ID NO: 814131 - DNA, 19 bp, Mus musculus
  siRNA target sequence for MGC36453 (NM_198645.1,678-696).
cctggatgacttaacgtta

SEQ ID NO: 814132 - DNA, 19 bp, Mus musculus
  siRNA target sequence for MGC36453 (NM_198645.1,679-697).
ctggatgacttaacgttat

SEQ ID NO: 814133 - DNA, 19 bp, Mus musculus
  siRNA target sequence for MGC36453 (NM_198645.1,681-699).
ggatgacttaacgttatta

SEQ ID NO: 814134 - DNA, 19 bp, Mus musculus
  siRNA target sequence for MGC36453 (NM_198645.1,682-700).
gatgacttaacgttattaa

SEQ ID NO: 814135 - DNA, 19 bp, Mus musculus
  siRNA target sequence for MGC36453 (NM_198645.1,693-711).
gttattaaagcgacttaga

SEQ ID NO: 814136 - DNA, 19 bp, Mus musculus
  siRNA target sequence for MGC36453 (NM_198645.1,734-752).
ggatgcagtcagaactaaa

SEQ ID NO: 814137 - DNA, 19 bp, Mus musculus
  siRNA target sequence for MGC36453 (NM_198645.1,800-818).
gctgccgagttcacttcaa

SEQ ID NO: 814138 - DNA, 19 bp, Mus musculus
  siRNA target sequence for LOC381062 (NM_198646.1,54-72).
ctttagtgcatgacttgat

SEQ ID NO: 814139 - DNA, 19 bp, Mus musculus
  siRNA target sequence for LOC381062 (NM_198646.1,98-116).
gaaatttgtgatatcaata

SEQ ID NO: 814140 - DNA, 19 bp, Mus musculus
  siRNA target sequence for LOC381062 (NM_198646.1,137-155).
gaagtacgatggaaagcaa

SEQ ID NO: 814141 - DNA, 19 bp, Mus musculus
  siRNA target sequence for LOC381062 (NM_198646.1,140-158).
gtacgatggaaagcaatta

SEQ ID NO: 814142 - DNA, 19 bp, Mus musculus
  siRNA target sequence for LOC381062 (NM_198646.1,159-177).
ctgaccgtgtgagatatga

SEQ ID NO: 814143 - DNA, 19 bp, Mus musculus
  siRNA target sequence for LOC381062 (NM_198646.1,163-181).
ccgtgtgagatatgaagaa

SEQ ID NO: 814144 - DNA, 19 bp, Mus musculus
  siRNA target sequence for LOC381062 (NM_198646.1,164-182).
cgtgtgagatatgaagaat

SEQ ID NO: 814145 - DNA, 19 bp, Mus musculus
  siRNA target sequence for LOC381062 (NM_198646.1,267-285).
ccagggctcagtttgaaat

SEQ ID NO: 814146 - DNA, 19 bp, Mus musculus
  siRNA target sequence for LOC381062 (NM_198646.1,270-288).
gggctcagtttgaaattca

SEQ ID NO: 814147 - DNA, 19 bp, Mus musculus
  siRNA target sequence for LOC381062 (NM_198646.1,300-318).
ggtaccagtggacaactta

SEQ ID NO: 814148 - DNA, 19 bp, Mus musculus
  siRNA target sequence for LOC381062 (NM_198646.1,301-319).
gtaccagtggacaacttat

SEQ ID NO: 814149 - DNA, 19 bp, Mus musculus
  siRNA target sequence for LOC381062 (NM_198646.1,304-322).
ccagtggacaacttatcca

SEQ ID NO: 814150 - DNA, 19 bp, Mus musculus
  siRNA target sequence for LOC381062 (NM_198646.1,312-330).
caacttatccagagttgtt

SEQ ID NO: 814151 - DNA, 19 bp, Mus musculus
  siRNA target sequence for LOC381062 (NM_198646.1,321-339).
cagagttgtttcttgagat

SEQ ID NO: 814152 - DNA, 19 bp, Mus musculus
  siRNA target sequence for LOC381062 (NM_198646.1,378-396).
ccctcggcgtgatgaaact

SEQ ID NO: 814153 - DNA, 19 bp, Mus musculus
  siRNA target sequence for LOC381062 (NM_198646.1,379-397).
cctcggcgtgatgaaacta

SEQ ID NO: 814154 - DNA, 19 bp, Mus musculus
  siRNA target sequence for LOC381062 (NM_198646.1,414-432).
gagccctcggcgacgtatt

SEQ ID NO: 814155 - DNA, 19 bp, Mus musculus
  siRNA target sequence for LOC381062 (NM_198646.1,416-434).
gccctcggcgacgtatttt

SEQ ID NO: 814156 - DNA, 19 bp, Mus musculus
  siRNA target sequence for LOC381062 (NM_198646.1,417-435).
ccctcggcgacgtattttt

SEQ ID NO: 814157 - DNA, 19 bp, Mus musculus
  siRNA target sequence for LOC381062 (NM_198646.1,418-436).
cctcggcgacgtattttta

SEQ ID NO: 814158 - DNA, 19 bp, Mus musculus
  siRNA target sequence for LOC381062 (NM_198646.1,502-520).
ctttggacatgctgtgaat

SEQ ID NO: 814159 - DNA, 19 bp, Mus musculus
  siRNA target sequence for LOC381062 (NM_198646.1,507-525).
gacatgctgtgaatattct

SEQ ID NO: 814160 - DNA, 19 bp, Mus musculus
  siRNA target sequence for BC045600 (NM_198647.1,231-249).
gatcctcggctcacaaaaa

SEQ ID NO: 814161 - DNA, 19 bp, Mus musculus
  siRNA target sequence for BC045600 (NM_198647.1,237-255).
cggctcacaaaaaacttca

SEQ ID NO: 814162 - DNA, 19 bp, Mus musculus
  siRNA target sequence for BC045600 (NM_198647.1,318-336).
gagtttgcgcggaatacca

SEQ ID NO: 814163 - DNA, 19 bp, Mus musculus
  siRNA target sequence for BC045600 (NM_198647.1,476-494).
gtcgcagtcgacaacatca

SEQ ID NO: 814164 - DNA, 19 bp, Mus musculus
  siRNA target sequence for BC045600 (NM_198647.1,505-523).
ccaactacaaggtcataaa

SEQ ID NO: 814165 - DNA, 19 bp, Mus musculus
  siRNA target sequence for BC045600 (NM_198647.1,857-875).
gaagcgggaggagtacttt

SEQ ID NO: 814166 - DNA, 19 bp, Mus musculus
  siRNA target sequence for BC045600 (NM_198647.1,877-895).
gcttcattgagcagtatta

SEQ ID NO: 814167 - DNA, 19 bp, Mus musculus
  siRNA target sequence for BC045600 (NM_198647.1,923-941).
ggatacctacagacagatt

SEQ ID NO: 814168 - DNA, 19 bp, Mus musculus
  siRNA target sequence for BC045600 (NM_198647.1,991-1009).
cgctcgtccaggagatctt

SEQ ID NO: 814169 - DNA, 19 bp, Mus musculus
  siRNA target sequence for BC045600 (NM_198647.1,992-1010).
gctcgtccaggagatcttt

SEQ ID NO: 814170 - DNA, 19 bp, Mus musculus
  siRNA target sequence for BC045600 (NM_198647.1,1055-1073).
gtatgtccagggaattaat

SEQ ID NO: 814171 - DNA, 19 bp, Mus musculus
  siRNA target sequence for BC045600 (NM_198647.1,1097-1115).
cgtcttcctctcggaatat

SEQ ID NO: 814172 - DNA, 19 bp, Mus musculus
  siRNA target sequence for BC045600 (NM_198647.1,1100-1118).
cttcctctcggaatatgta

SEQ ID NO: 814173 - DNA, 19 bp, Mus musculus
  siRNA target sequence for BC045600 (NM_198647.1,1103-1121).
cctctcggaatatgtagaa

SEQ ID NO: 814174 - DNA, 19 bp, Mus musculus
  siRNA target sequence for BC045600 (NM_198647.1,1160-1178).
ggacatgctgcgaagcatt

SEQ ID NO: 814175 - DNA, 19 bp, Mus musculus
  siRNA target sequence for BC045600 (NM_198647.1,1215-1233).
gacggaatacaggataatt

SEQ ID NO: 814176 - DNA, 19 bp, Mus musculus
  siRNA target sequence for BC045600 (NM_198647.1,1448-1466).
ctcgcacttccatctctat

SEQ ID NO: 814177 - DNA, 19 bp, Mus musculus
  siRNA target sequence for BC045600 (NM_198647.1,1602-1620).
gcctacagactcaagtaca

SEQ ID NO: 814178 - DNA, 19 bp, Mus musculus
  siRNA target sequence for BC045600 (NM_198647.1,1607-1625).
cagactcaagtacatgttt

SEQ ID NO: 814179 - DNA, 19 bp, Mus musculus
  siRNA target sequence for D930036B08Rik (NM_198649.1,362-380).
cacatccgatgcttcactt

SEQ ID NO: 814180 - DNA, 19 bp, Mus musculus
  siRNA target sequence for D930036B08Rik (NM_198649.1,367-385).
ccgatgcttcacttgtcaa

SEQ ID NO: 814181 - DNA, 19 bp, Mus musculus
  siRNA target sequence for D930036B08Rik (NM_198649.1,404-422).
gcccagtcgggcttcttct

SEQ ID NO: 814182 - DNA, 19 bp, Mus musculus
  siRNA target sequence for D930036B08Rik (NM_198649.1,411-429).
cgggcttcttcttcaagaa

SEQ ID NO: 814183 - DNA, 19 bp, Mus musculus
  siRNA target sequence for D930036B08Rik (NM_198649.1,530-548).
cgtacctaccaccctaaat

SEQ ID NO: 814184 - DNA, 19 bp, Mus musculus
  siRNA target sequence for D930036B08Rik (NM_198649.1,539-557).
caccctaaatgcttcgtat

SEQ ID NO: 814185 - DNA, 19 bp, Mus musculus
  siRNA target sequence for D930036B08Rik (NM_198649.1,747-765).
ggcacgtcagctgtttcaa

SEQ ID NO: 814186 - DNA, 19 bp, Mus musculus
  siRNA target sequence for D930036B08Rik (NM_198649.1,807-825).
gcaaagacggtgttccata

SEQ ID NO: 814187 - DNA, 19 bp, Mus musculus
  siRNA target sequence for D930036B08Rik (NM_198649.1,847-865).
ccagtttggcatcaaatgt

SEQ ID NO: 814188 - DNA, 19 bp, Mus musculus
  siRNA target sequence for D930036B08Rik (NM_198649.1,947-965).
cgctgccaccagatgttca

SEQ ID NO: 814189 - DNA, 19 bp, Mus musculus
  siRNA target sequence for D930036B08Rik (NM_198649.1,1054-1072).
caggcggacatctgaaact

SEQ ID NO: 814190 - DNA, 19 bp, Mus musculus
  siRNA target sequence for D930036B08Rik (NM_198649.1,1125-1143).
ctaaagtggataatgagat

SEQ ID NO: 814191 - DNA, 19 bp, Mus musculus
  siRNA target sequence for D930036B08Rik (NM_198649.1,1130-1148).
gtggataatgagatcctta

SEQ ID NO: 814192 - DNA, 19 bp, Mus musculus
  siRNA target sequence for D930036B08Rik (NM_198649.1,1132-1150).
ggataatgagatccttaat

SEQ ID NO: 814193 - DNA, 19 bp, Mus musculus
  siRNA target sequence for D930036B08Rik (NM_198649.1,1163-1181).
gcagctctccccaaggtta

SEQ ID NO: 814194 - DNA, 19 bp, Mus musculus
  siRNA target sequence for D930036B08Rik (NM_198649.1,1164-1182).
cagctctccccaaggttaa

SEQ ID NO: 814195 - DNA, 19 bp, Mus musculus
  siRNA target sequence for D930036B08Rik (NM_198649.1,1223-1241).
gagcctcattccagataca

SEQ ID NO: 814196 - DNA, 19 bp, Mus musculus
  siRNA target sequence for D930036B08Rik (NM_198649.1,1258-1276).
ggagagatgcggttatgga

SEQ ID NO: 814197 - DNA, 19 bp, Mus musculus
  siRNA target sequence for D930036B08Rik (NM_198649.1,1279-1297).
gtcactgggaacattatct

SEQ ID NO: 814198 - DNA, 19 bp, Mus musculus
  siRNA target sequence for D930036B08Rik (NM_198649.1,1410-1428).
cccgctcgcctcattacta

SEQ ID NO: 814199 - DNA, 19 bp, Mus musculus
  siRNA target sequence for D930036B08Rik (NM_198649.1,1450-1468).
ccggagctccccataccat

SEQ ID NO: 814200 - DNA, 19 bp, Mus musculus
  siRNA target sequence for D930036B08Rik (NM_198649.1,1451-1469).
cggagctccccataccata

SEQ ID NO: 814201 - DNA, 19 bp, Mus musculus
  siRNA target sequence for D930036B08Rik (NM_198649.1,1512-1530).
ctcccaagcactttcacat

SEQ ID NO: 814202 - DNA, 19 bp, Mus musculus
  siRNA target sequence for D930036B08Rik (NM_198649.1,1608-1626).
gcaaaacaagtgaagacat

SEQ ID NO: 814203 - DNA, 19 bp, Mus musculus
  siRNA target sequence for D930036B08Rik (NM_198649.1,1657-1675).
ctcgccagacccctactat

SEQ ID NO: 814204 - DNA, 19 bp, Mus musculus
  siRNA target sequence for D930036B08Rik (NM_198649.1,1661-1679).
ccagacccctactatgctt

SEQ ID NO: 814205 - DNA, 19 bp, Mus musculus
  siRNA target sequence for D930036B08Rik (NM_198649.1,1898-1916).
cacaccactggctatgaga

SEQ ID NO: 814206 - DNA, 19 bp, Mus musculus
  siRNA target sequence for D930036B08Rik (NM_198649.1,1961-1979).
gatcccctcatctccaaat

SEQ ID NO: 814207 - DNA, 19 bp, Mus musculus
  siRNA target sequence for D930036B08Rik (NM_198649.1,1990-2008).
gcctgcctacaggagaaat

SEQ ID NO: 814208 - DNA, 19 bp, Mus musculus
  siRNA target sequence for D930036B08Rik (NM_198649.1,2070-2088).
ggggcatgcgagagtacaa

SEQ ID NO: 814209 - DNA, 19 bp, Mus musculus
  siRNA target sequence for D930036B08Rik (NM_198649.1,2072-2090).
ggcatgcgagagtacaaga

SEQ ID NO: 814210 - DNA, 19 bp, Mus musculus
  siRNA target sequence for D930036B08Rik (NM_198649.1,2073-2091).
gcatgcgagagtacaagat

SEQ ID NO: 814211 - DNA, 19 bp, Mus musculus
  siRNA target sequence for D930036B08Rik (NM_198649.1,2077-2095).
gcgagagtacaagatctat

SEQ ID NO: 814212 - DNA, 19 bp, Mus musculus
  siRNA target sequence for D930036B08Rik (NM_198649.1,2083-2101).
gtacaagatctatccttat

SEQ ID NO: 814213 - DNA, 19 bp, Mus musculus
  siRNA target sequence for D930036B08Rik (NM_198649.1,2131-2149).
gaaccgactgccaaaggat

SEQ ID NO: 814214 - DNA, 19 bp, Mus musculus
  siRNA target sequence for MGC54868 (NM_198650.1,46-64).
cgcttccagcttgtctata

SEQ ID NO: 814215 - DNA, 19 bp, Mus musculus
  siRNA target sequence for MGC54868 (NM_198650.1,48-66).
cttccagcttgtctataca

SEQ ID NO: 814216 - DNA, 19 bp, Mus musculus
  siRNA target sequence for MGC54868 (NM_198650.1,101-119).
gccataccttcctacagaa

SEQ ID NO: 814217 - DNA, 19 bp, Mus musculus
  siRNA target sequence for MGC54868 (NM_198650.1,151-169).
caacatcctgccaactaca

SEQ ID NO: 814218 - DNA, 19 bp, Mus musculus
  siRNA target sequence for MGC54868 (NM_198650.1,172-190).
gaacctaccaccaatgtct

SEQ ID NO: 814219 - DNA, 19 bp, Mus musculus
  siRNA target sequence for MGC54868 (NM_198650.1,266-284).
ctcagtgggcccttctgaa

SEQ ID NO: 814220 - DNA, 19 bp, Mus musculus
  siRNA target sequence for MGC54868 (NM_198650.1,336-354).
ggtctacgaccgaagcatt

SEQ ID NO: 814221 - DNA, 19 bp, Mus musculus
  siRNA target sequence for MGC54868 (NM_198650.1,337-355).
gtctacgaccgaagcattt

SEQ ID NO: 814222 - DNA, 19 bp, Mus musculus
  siRNA target sequence for MGC54868 (NM_198650.1,628-646).
ctctccctggttgtagaat

SEQ ID NO: 814223 - DNA, 19 bp, Mus musculus
  siRNA target sequence for MGC54868 (NM_198650.1,632-650).
ccctggttgtagaatggat

SEQ ID NO: 814224 - DNA, 19 bp, Mus musculus
  siRNA target sequence for MGC54868 (NM_198650.1,1039-1057).
ggggtctggttctctaatt

SEQ ID NO: 814225 - DNA, 19 bp, Mus musculus
  siRNA target sequence for MGC54868 (NM_198650.1,1041-1059).
ggtctggttctctaattct

SEQ ID NO: 814226 - DNA, 19 bp, Mus musculus
  siRNA target sequence for MGC54868 (NM_198650.1,1080-1098).
catggacctgcagaagttt

SEQ ID NO: 814227 - DNA, 19 bp, Mus musculus
  siRNA target sequence for MGC54868 (NM_198650.1,1163-1181).
ccaccaccacgatgattta

SEQ ID NO: 814228 - DNA, 19 bp, Mus musculus
  siRNA target sequence for MGC54868 (NM_198650.1,1164-1182).
caccaccacgatgatttat

SEQ ID NO: 814229 - DNA, 19 bp, Mus musculus
  siRNA target sequence for MGC54868 (NM_198650.1,1233-1251).
ggtcattgccaacatgttt

SEQ ID NO: 814230 - DNA, 19 bp, Mus musculus
  siRNA target sequence for MGC54868 (NM_198650.1,1319-1337).
ccttcatctgcgtgtatct

SEQ ID NO: 814231 - DNA, 19 bp, Mus musculus
  siRNA target sequence for MGC54868 (NM_198650.1,1581-1599).
caaacaaggccgttccaaa

SEQ ID NO: 814232 - DNA, 19 bp, Mus musculus
  siRNA target sequence for MGC54868 (NM_198650.1,1647-1665).
ggcttcacccctcaaagaa

SEQ ID NO: 814233 - DNA, 19 bp, Mus musculus
  siRNA target sequence for MGC54868 (NM_198650.1,1648-1666).
gcttcacccctcaaagaaa

SEQ ID NO: 814234 - DNA, 19 bp, Mus musculus
  siRNA target sequence for LOC381218 (NM_198651.1,460-478).
gagatttgtaaaggtattt

SEQ ID NO: 814235 - DNA, 19 bp, Mus musculus
  siRNA target sequence for LOC381218 (NM_198651.1,497-515).
ggagctgtcgcagaacttt

SEQ ID NO: 814236 - DNA, 19 bp, Mus musculus
  siRNA target sequence for LOC381218 (NM_198651.1,501-519).
ctgtcgcagaacttttaga

SEQ ID NO: 814237 - DNA, 19 bp, Mus musculus
  siRNA target sequence for LOC381218 (NM_198651.1,526-544).
cctaaccaggtttgaatta

SEQ ID NO: 814238 - DNA, 19 bp, Mus musculus
  siRNA target sequence for LOC381218 (NM_198651.1,531-549).
ccaggtttgaattagtaca

SEQ ID NO: 814239 - DNA, 19 bp, Mus musculus
  siRNA target sequence for LOC381218 (NM_198651.1,572-590).
gagttggcctactatgaaa

SEQ ID NO: 814240 - DNA, 19 bp, Mus musculus
  siRNA target sequence for LOC381218 (NM_198651.1,574-592).
gttggcctactatgaaaaa

SEQ ID NO: 814241 - DNA, 19 bp, Mus musculus
  siRNA target sequence for LOC381218 (NM_198651.1,661-679).
gctcatgaagacagctatt

SEQ ID NO: 814242 - DNA, 19 bp, Mus musculus
  siRNA target sequence for LOC381218 (NM_198651.1,721-739).
gacagccatcctagaatgt

SEQ ID NO: 814243 - DNA, 19 bp, Mus musculus
  siRNA target sequence for LOC381218 (NM_198651.1,740-758).
gtgttcccgtgtaaaaaca

SEQ ID NO: 814244 - DNA, 19 bp, Mus musculus
  siRNA target sequence for LOC381218 (NM_198651.1,742-760).
gttcccgtgtaaaaacaga

SEQ ID NO: 814245 - DNA, 19 bp, Mus musculus
  siRNA target sequence for LOC381218 (NM_198651.1,746-764).
ccgtgtaaaaacagattca

SEQ ID NO: 814246 - DNA, 19 bp, Mus musculus
  siRNA target sequence for LOC381218 (NM_198651.1,747-765).
cgtgtaaaaacagattcat

SEQ ID NO: 814247 - DNA, 19 bp, Mus musculus
  siRNA target sequence for LOC381218 (NM_198651.1,773-791).
gaaaggtgtagattggaaa

SEQ ID NO: 814248 - DNA, 19 bp, Mus musculus
  siRNA target sequence for LOC381218 (NM_198651.1,778-796).
gtgtagattggaaagatct

SEQ ID NO: 814249 - DNA, 19 bp, Mus musculus
  siRNA target sequence for LOC381218 (NM_198651.1,824-842).
caggcaactaacaggaaaa

SEQ ID NO: 814250 - DNA, 19 bp, Mus musculus
  siRNA target sequence for LOC381218 (NM_198651.1,938-956).
cgcaaccatgggaaaagct

SEQ ID NO: 814251 - DNA, 19 bp, Mus musculus
  siRNA target sequence for LOC381218 (NM_198651.1,1006-1024).
cagtgggaacccatttggt

SEQ ID NO: 814252 - DNA, 19 bp, Mus musculus
  siRNA target sequence for LOC381218 (NM_198651.1,1016-1034).
ccatttggtgaaaataatt

SEQ ID NO: 814253 - DNA, 19 bp, Mus musculus
  siRNA target sequence for LOC381218 (NM_198651.1,1081-1099).
ctttgatctttcgaagaaa

SEQ ID NO: 814254 - DNA, 19 bp, Mus musculus
  siRNA target sequence for LOC381218 (NM_198651.1,1117-1135).
cagcctggaggcgaacata

SEQ ID NO: 814255 - DNA, 19 bp, Mus musculus
  siRNA target sequence for LOC381218 (NM_198651.1,1119-1137).
gcctggaggcgaacataaa

SEQ ID NO: 814256 - DNA, 19 bp, Mus musculus
  siRNA target sequence for LOC381218 (NM_198651.1,1123-1141).
ggaggcgaacataaaggtt

SEQ ID NO: 814257 - DNA, 19 bp, Mus musculus
  siRNA target sequence for LOC381218 (NM_198651.1,1124-1142).
gaggcgaacataaaggtta

SEQ ID NO: 814258 - DNA, 19 bp, Mus musculus
  siRNA target sequence for LOC381218 (NM_198651.1,1151-1169).
ccagatgagcggattgtct

SEQ ID NO: 814259 - DNA, 19 bp, Mus musculus
  siRNA target sequence for LOC381218 (NM_198651.1,1157-1175).
gagcggattgtcttaaaga

SEQ ID NO: 814260 - DNA, 19 bp, Mus musculus
  siRNA target sequence for LOC381218 (NM_198651.1,1184-1202).
ccaccacctgtagattcaa

SEQ ID NO: 814261 - DNA, 19 bp, Mus musculus
  siRNA target sequence for LOC381218 (NM_198651.1,1311-1329).
ctcttctccaagaaaggtt

SEQ ID NO: 814262 - DNA, 19 bp, Mus musculus
  siRNA target sequence for LOC381218 (NM_198651.1,1326-1344).
ggttccagcctttttctca

SEQ ID NO: 814263 - DNA, 19 bp, Mus musculus
  siRNA target sequence for MGC63429 (NM_198653.1,387-405).
gtggcttttcagagcttta

SEQ ID NO: 814264 - DNA, 19 bp, Mus musculus
  siRNA target sequence for MGC63429 (NM_198653.1,469-487).
caacggtgaccctcatgtt

SEQ ID NO: 814265 - DNA, 19 bp, Mus musculus
  siRNA target sequence for MGC63429 (NM_198653.1,495-513).
ccctgaacaagattttgaa

SEQ ID NO: 814266 - DNA, 19 bp, Mus musculus
  siRNA target sequence for MGC63429 (NM_198653.1,521-539).
gccaatcgattccatatga

SEQ ID NO: 814267 - DNA, 19 bp, Mus musculus
  siRNA target sequence for MGC63429 (NM_198653.1,522-540).
ccaatcgattccatatgat

SEQ ID NO: 814268 - DNA, 19 bp, Mus musculus
  siRNA target sequence for MGC63429 (NM_198653.1,543-561).
gaggttccaaggtacactt

SEQ ID NO: 814269 - DNA, 19 bp, Mus musculus
  siRNA target sequence for MGC63429 (NM_198653.1,585-603).
gcttgcccattgaaacaaa

SEQ ID NO: 814270 - DNA, 19 bp, Mus musculus
  siRNA target sequence for MGC63429 (NM_198653.1,590-608).
cccattgaaacaaaagtgt

SEQ ID NO: 814271 - DNA, 19 bp, Mus musculus
  siRNA target sequence for MGC63429 (NM_198653.1,623-641).
gtagatgcccagagtcttt

SEQ ID NO: 814272 - DNA, 19 bp, Mus musculus
  siRNA target sequence for MGC63429 (NM_198653.1,739-757).
gaataactgctattacaca

SEQ ID NO: 814273 - DNA, 19 bp, Mus musculus
  siRNA target sequence for MGC63429 (NM_198653.1,776-794).
gccaagcagctgagagtat

SEQ ID NO: 814274 - DNA, 19 bp, Mus musculus
  siRNA target sequence for MGC63429 (NM_198653.1,785-803).
ctgagagtattctaccaaa

SEQ ID NO: 814275 - DNA, 19 bp, Mus musculus
  siRNA target sequence for MGC63429 (NM_198653.1,811-829).
gaagggcttggtttatcga

SEQ ID NO: 814276 - DNA, 19 bp, Mus musculus
  siRNA target sequence for MGC63429 (NM_198653.1,816-834).
gcttggtttatcgatctta

SEQ ID NO: 814277 - DNA, 19 bp, Mus musculus
  siRNA target sequence for MGC63429 (NM_198653.1,820-838).
ggtttatcgatcttacaaa

SEQ ID NO: 814278 - DNA, 19 bp, Mus musculus
  siRNA target sequence for MGC63429 (NM_198653.1,828-846).
gatcttacaaaccagtata

SEQ ID NO: 814279 - DNA, 19 bp, Mus musculus
  siRNA target sequence for MGC63429 (NM_198653.1,905-923).
catgtcagtcggtcgatat

SEQ ID NO: 814280 - DNA, 19 bp, Mus musculus
  siRNA target sequence for MGC63429 (NM_198653.1,910-928).
cagtcggtcgatatacgta

SEQ ID NO: 814281 - DNA, 19 bp, Mus musculus
  siRNA target sequence for MGC63429 (NM_198653.1,914-932).
cggtcgatatacgtaagat

SEQ ID NO: 814282 - DNA, 19 bp, Mus musculus
  siRNA target sequence for MGC63429 (NM_198653.1,915-933).
ggtcgatatacgtaagatt

SEQ ID NO: 814283 - DNA, 19 bp, Mus musculus
  siRNA target sequence for MGC63429 (NM_198653.1,953-971).
ccgaagttggagtctctta

SEQ ID NO: 814284 - DNA, 19 bp, Mus musculus
  siRNA target sequence for MGC63429 (NM_198653.1,955-973).
gaagttggagtctcttaca

SEQ ID NO: 814285 - DNA, 19 bp, Mus musculus
  siRNA target sequence for MGC63429 (NM_198653.1,958-976).
gttggagtctcttacagat

SEQ ID NO: 814286 - DNA, 19 bp, Mus musculus
  siRNA target sequence for MGC63429 (NM_198653.1,984-1002).
cccctgttagcgttttagt

SEQ ID NO: 814287 - DNA, 19 bp, Mus musculus
  siRNA target sequence for MGC63429 (NM_198653.1,986-1004).
cctgttagcgttttagttt

SEQ ID NO: 814288 - DNA, 19 bp, Mus musculus
  siRNA target sequence for MGC63429 (NM_198653.1,1009-1027).
cacccagccttggacaatt

SEQ ID NO: 814289 - DNA, 19 bp, Mus musculus
  siRNA target sequence for MGC63429 (NM_198653.1,1028-1046).
cccgccaaccaggcaattt

SEQ ID NO: 814290 - DNA, 19 bp, Mus musculus
  siRNA target sequence for MGC63429 (NM_198653.1,1031-1049).
gccaaccaggcaatttgct

SEQ ID NO: 814291 - DNA, 19 bp, Mus musculus
  siRNA target sequence for MGC63429 (NM_198653.1,1032-1050).
ccaaccaggcaatttgcta

SEQ ID NO: 814292 - DNA, 19 bp, Mus musculus
  siRNA target sequence for MGC63429 (NM_198653.1,1033-1051).
caaccaggcaatttgctat

SEQ ID NO: 814293 - DNA, 19 bp, Mus musculus
  siRNA target sequence for MGC63429 (NM_198653.1,1089-1107).
cctctgggcacctctacat

SEQ ID NO: 814294 - DNA, 19 bp, Mus musculus
  siRNA target sequence for MGC63429 (NM_198653.1,1140-1158).
ctgccttggaaacaacatt

SEQ ID NO: 814295 - DNA, 19 bp, Mus musculus
  siRNA target sequence for MGC63429 (NM_198653.1,1190-1208).
ctggaaggtggcacttgta

SEQ ID NO: 814296 - DNA, 19 bp, Mus musculus
  siRNA target sequence for MGC63429 (NM_198653.1,1213-1231).
ccctttaactcccgataaa

SEQ ID NO: 814297 - DNA, 19 bp, Mus musculus
  siRNA target sequence for MGC63429 (NM_198653.1,1215-1233).
ctttaactcccgataaagt

SEQ ID NO: 814298 - DNA, 19 bp, Mus musculus
  siRNA target sequence for MGC63429 (NM_198653.1,1248-1266).
ctgctacccacgtgactat

SEQ ID NO: 814299 - DNA, 19 bp, Mus musculus
  siRNA target sequence for MGC63429 (NM_198653.1,1259-1277).
gtgactatggccaaaggaa

SEQ ID NO: 814300 - DNA, 19 bp, Mus musculus
  siRNA target sequence for MGC63429 (NM_198653.1,1297-1315).
cccagctcacggtatggaa

SEQ ID NO: 814301 - DNA, 19 bp, Mus musculus
  siRNA target sequence for MGC63429 (NM_198653.1,1302-1320).
ctcacggtatggaagatta

SEQ ID NO: 814302 - DNA, 19 bp, Mus musculus
  siRNA target sequence for MGC63429 (NM_198653.1,1304-1322).
cacggtatggaagattaca

SEQ ID NO: 814303 - DNA, 19 bp, Mus musculus
  siRNA target sequence for MGC63429 (NM_198653.1,1461-1479).
ctaccaagaatgtgttgaa

SEQ ID NO: 814304 - DNA, 19 bp, Mus musculus
  siRNA target sequence for MGC63429 (NM_198653.1,1546-1564).
cagcaagcagtggtttgta

SEQ ID NO: 814305 - DNA, 19 bp, Mus musculus
  siRNA target sequence for MGC63429 (NM_198653.1,1548-1566).
gcaagcagtggtttgtaaa

SEQ ID NO: 814306 - DNA, 19 bp, Mus musculus
  siRNA target sequence for MGC63429 (NM_198653.1,1599-1617).
cgttgaagacggtgaagtt

SEQ ID NO: 814307 - DNA, 19 bp, Mus musculus
  siRNA target sequence for MGC63429 (NM_198653.1,1664-1682).
cggccgtactggtgcatat

SEQ ID NO: 814308 - DNA, 19 bp, Mus musculus
  siRNA target sequence for MGC63429 (NM_198653.1,1708-1726).
cattcctgtgtttcatcat

SEQ ID NO: 814309 - DNA, 19 bp, Mus musculus
  siRNA target sequence for MGC63429 (NM_198653.1,1715-1733).
gtgtttcatcataagacaa

SEQ ID NO: 814310 - DNA, 19 bp, Mus musculus
  siRNA target sequence for MGC63429 (NM_198653.1,1717-1735).
gtttcatcataagacaaaa

SEQ ID NO: 814311 - DNA, 19 bp, Mus musculus
  siRNA target sequence for MGC63429 (NM_198653.1,1756-1774).
ccaaaccactgagcatatt

SEQ ID NO: 814312 - DNA, 19 bp, Mus musculus
  siRNA target sequence for MGC63429 (NM_198653.1,1757-1775).
caaaccactgagcatatta

SEQ ID NO: 814313 - DNA, 19 bp, Mus musculus
  siRNA target sequence for MGC63429 (NM_198653.1,1764-1782).
ctgagcatattattaaact

SEQ ID NO: 814314 - DNA, 19 bp, Mus musculus
  siRNA target sequence for MGC63429 (NM_198653.1,1866-1884).
gccctggggctttggaata

SEQ ID NO: 814315 - DNA, 19 bp, Mus musculus
  siRNA target sequence for MGC63429 (NM_198653.1,1887-1905).
cgccagggcaggacatttt

SEQ ID NO: 814316 - DNA, 19 bp, Mus musculus
  siRNA target sequence for MGC63429 (NM_198653.1,1890-1908).
cagggcaggacattttgga

SEQ ID NO: 814317 - DNA, 19 bp, Mus musculus
  siRNA target sequence for MGC63429 (NM_198653.1,1915-1933).
gtttgacagtggaacttca

SEQ ID NO: 814318 - DNA, 19 bp, Mus musculus
  siRNA target sequence for MGC63429 (NM_198653.1,2011-2029).
ccagtcttccttactaaca

SEQ ID NO: 814319 - DNA, 19 bp, Mus musculus
  siRNA target sequence for MGC63429 (NM_198653.1,2012-2030).
cagtcttccttactaacaa

SEQ ID NO: 814320 - DNA, 19 bp, Mus musculus
  siRNA target sequence for MGC63429 (NM_198653.1,2068-2086).
gatggttcatggatttaca

SEQ ID NO: 814321 - DNA, 19 bp, Mus musculus
  siRNA target sequence for MGC63429 (NM_198653.1,2116-2134).
gtccctcgggaatgtcatt

SEQ ID NO: 814322 - DNA, 19 bp, Mus musculus
  siRNA target sequence for MGC63429 (NM_198653.1,2118-2136).
ccctcgggaatgtcattaa

SEQ ID NO: 814323 - DNA, 19 bp, Mus musculus
  siRNA target sequence for MGC63429 (NM_198653.1,2119-2137).
cctcgggaatgtcattaat

SEQ ID NO: 814324 - DNA, 19 bp, Mus musculus
  siRNA target sequence for MGC63429 (NM_198653.1,2122-2140).
cgggaatgtcattaatcct

SEQ ID NO: 814325 - DNA, 19 bp, Mus musculus
  siRNA target sequence for MGC63429 (NM_198653.1,2338-2356).
ccccgagacagattctgtt

SEQ ID NO: 814326 - DNA, 19 bp, Mus musculus
  siRNA target sequence for MGC63429 (NM_198653.1,2384-2402).
cagtatatgctgcacttaa

SEQ ID NO: 814327 - DNA, 19 bp, Mus musculus
  siRNA target sequence for MGC63429 (NM_198653.1,2386-2404).
gtatatgctgcacttaatt

SEQ ID NO: 814328 - DNA, 19 bp, Mus musculus
  siRNA target sequence for MGC63429 (NM_198653.1,2405-2423).
caggattttgcgacaaaga

SEQ ID NO: 814329 - DNA, 19 bp, Mus musculus
  siRNA target sequence for MGC63429 (NM_198653.1,2407-2425).
ggattttgcgacaaagatt

SEQ ID NO: 814330 - DNA, 19 bp, Mus musculus
  siRNA target sequence for MGC63429 (NM_198653.1,2408-2426).
gattttgcgacaaagatta

SEQ ID NO: 814331 - DNA, 19 bp, Mus musculus
  siRNA target sequence for MGC63429 (NM_198653.1,2422-2440).
gattactgactcatacaaa

SEQ ID NO: 814332 - DNA, 19 bp, Mus musculus
  siRNA target sequence for MGC63429 (NM_198653.1,2468-2486).
ctgttgaaagccttctaca

SEQ ID NO: 814333 - DNA, 19 bp, Mus musculus
  siRNA target sequence for MGC63429 (NM_198653.1,2490-2508).
gagaactgtccagctttta

SEQ ID NO: 814334 - DNA, 19 bp, Mus musculus
  siRNA target sequence for MGC63429 (NM_198653.1,2492-2510).
gaactgtccagcttttact

SEQ ID NO: 814335 - DNA, 19 bp, Mus musculus
  siRNA target sequence for MGC63429 (NM_198653.1,2529-2547).
ggctctactgcgaaaacga

SEQ ID NO: 814336 - DNA, 19 bp, Mus musculus
  siRNA target sequence for MGC63429 (NM_198653.1,2575-2593).
gacagcattggcagaaatt

SEQ ID NO: 814337 - DNA, 19 bp, Mus musculus
  siRNA target sequence for MGC63429 (NM_198653.1,2586-2604).
cagaaattttggatgtgtt

SEQ ID NO: 814338 - DNA, 19 bp, Mus musculus
  siRNA target sequence for MGC63429 (NM_198653.1,2659-2677).
cattccctatgttacagaa

SEQ ID NO: 814339 - DNA, 19 bp, Mus musculus
  siRNA target sequence for MGC63429 (NM_198653.1,2693-2711).
cgcactggctggattaata

SEQ ID NO: 814340 - DNA, 19 bp, Mus musculus
  siRNA target sequence for MGC63429 (NM_198653.1,2704-2722).
gattaatacaagctctatt

SEQ ID NO: 814341 - DNA, 19 bp, Mus musculus
  siRNA target sequence for MGC63429 (NM_198653.1,2791-2809).
catccctggcaaaaatgct

SEQ ID NO: 814342 - DNA, 19 bp, Mus musculus
  siRNA target sequence for MGC63429 (NM_198653.1,2985-3003).
cggggacattcgtcatcaa

SEQ ID NO: 814343 - DNA, 19 bp, Mus musculus
  siRNA target sequence for MGC63429 (NM_198653.1,2986-3004).
ggggacattcgtcatcaat

SEQ ID NO: 814344 - DNA, 19 bp, Mus musculus
  siRNA target sequence for MGC63429 (NM_198653.1,2988-3006).
ggacattcgtcatcaatct

SEQ ID NO: 814345 - DNA, 19 bp, Mus musculus
  siRNA target sequence for MGC63429 (NM_198653.1,2989-3007).
gacattcgtcatcaatcta

SEQ ID NO: 814346 - DNA, 19 bp, Mus musculus
  siRNA target sequence for MGC63429 (NM_198653.1,3023-3041).
cgtgaggagtcttcatata

SEQ ID NO: 814347 - DNA, 19 bp, Mus musculus
  siRNA target sequence for MGC63429 (NM_198653.1,3024-3042).
gtgaggagtcttcatataa

SEQ ID NO: 814348 - DNA, 19 bp, Mus musculus
  siRNA target sequence for MGC63429 (NM_198653.1,3029-3047).
gagtcttcatataaagtca

SEQ ID NO: 814349 - DNA, 19 bp, Mus musculus
  siRNA target sequence for MGC63429 (NM_198653.1,3077-3095).
cctcgatgttggaagcata

SEQ ID NO: 814350 - DNA, 19 bp, Mus musculus
  siRNA target sequence for LOC381318 (NM_198654.1,242-260).
gcacagtggacatttgagt

SEQ ID NO: 814351 - DNA, 19 bp, Mus musculus
  siRNA target sequence for LOC381318 (NM_198654.1,269-287).
caggagaacgtcagcttta

SEQ ID NO: 814352 - DNA, 19 bp, Mus musculus
  siRNA target sequence for MGC56946 (NM_198656.1,332-350).
ggggagctcttcaataata

SEQ ID NO: 814353 - DNA, 19 bp, Mus musculus
  siRNA target sequence for MGC56946 (NM_198656.1,387-405).
gacctggtgtggacgaatt

SEQ ID NO: 814354 - DNA, 19 bp, Mus musculus
  siRNA target sequence for MGC56946 (NM_198656.1,397-415).
ggacgaatttccagagatt

SEQ ID NO: 814355 - DNA, 19 bp, Mus musculus
  siRNA target sequence for MGC56946 (NM_198656.1,401-419).
gaatttccagagattggtt

SEQ ID NO: 814356 - DNA, 19 bp, Mus musculus
  siRNA target sequence for MGC56946 (NM_198656.1,439-457).
ccagagtggaaaaatatat

SEQ ID NO: 814357 - DNA, 19 bp, Mus musculus
  siRNA target sequence for MGC56946 (NM_198656.1,444-462).
gtggaaaaatatatgttca

SEQ ID NO: 814358 - DNA, 19 bp, Mus musculus
  siRNA target sequence for MGC56946 (NM_198656.1,530-548).
gggaaagttgtggatgaat

SEQ ID NO: 814359 - DNA, 19 bp, Mus musculus
  siRNA target sequence for MGC56946 (NM_198656.1,545-563).
gaatccctgattttcaaca

SEQ ID NO: 814360 - DNA, 19 bp, Mus musculus
  siRNA target sequence for MGC56946 (NM_198656.1,641-659).
gccgcaggtcaacctattt

SEQ ID NO: 814361 - DNA, 19 bp, Mus musculus
  siRNA target sequence for MGC56946 (NM_198656.1,642-660).
ccgcaggtcaacctatttt

SEQ ID NO: 814362 - DNA, 19 bp, Mus musculus
  siRNA target sequence for MGC56946 (NM_198656.1,643-661).
cgcaggtcaacctattttt

SEQ ID NO: 814363 - DNA, 19 bp, Mus musculus
  siRNA target sequence for MGC56946 (NM_198656.1,645-663).
caggtcaacctatttttca

SEQ ID NO: 814364 - DNA, 19 bp, Mus musculus
  siRNA target sequence for MGC56946 (NM_198656.1,647-665).
ggtcaacctatttttcagt

SEQ ID NO: 814365 - DNA, 19 bp, Mus musculus
  siRNA target sequence for MGC56946 (NM_198656.1,648-666).
gtcaacctatttttcagtt

SEQ ID NO: 814366 - DNA, 19 bp, Mus musculus
  siRNA target sequence for MGC56946 (NM_198656.1,756-774).
gctttcggattgatctcat

SEQ ID NO: 814367 - DNA, 19 bp, Mus musculus
  siRNA target sequence for MGC56946 (NM_198656.1,787-805).
gcgactctcgggatgctta

SEQ ID NO: 814368 - DNA, 19 bp, Mus musculus
  siRNA target sequence for MGC56946 (NM_198656.1,793-811).
ctcgggatgcttacattat

SEQ ID NO: 814369 - DNA, 19 bp, Mus musculus
  siRNA target sequence for MGC56946 (NM_198656.1,795-813).
cgggatgcttacattatga

SEQ ID NO: 814370 - DNA, 19 bp, Mus musculus
  siRNA target sequence for MGC56946 (NM_198656.1,934-952).
ggaagaccgttatgagatt

SEQ ID NO: 814371 - DNA, 19 bp, Mus musculus
  siRNA target sequence for MGC56946 (NM_198656.1,973-991).
cgaacagggtgtgttgtat

SEQ ID NO: 814372 - DNA, 19 bp, Mus musculus
  siRNA target sequence for MGC56946 (NM_198656.1,1033-1051).
gagaacacaattcaacata

SEQ ID NO: 814373 - DNA, 19 bp, Mus musculus
  siRNA target sequence for MGC56946 (NM_198656.1,1060-1078).
caacgaggagggccatttt

SEQ ID NO: 814374 - DNA, 19 bp, Mus musculus
  siRNA target sequence for MGC56946 (NM_198656.1,1063-1081).
cgaggagggccattttgat

SEQ ID NO: 814375 - DNA, 19 bp, Mus musculus
  siRNA target sequence for MGC56946 (NM_198656.1,1064-1082).
gaggagggccattttgata

SEQ ID NO: 814376 - DNA, 19 bp, Mus musculus
  siRNA target sequence for MGC56946 (NM_198656.1,1099-1117).
gaccaaccaagggttgtta

SEQ ID NO: 814377 - DNA, 19 bp, Mus musculus
  siRNA target sequence for MGC56946 (NM_198656.1,1102-1120).
caaccaagggttgttaagt

SEQ ID NO: 814378 - DNA, 19 bp, Mus musculus
  siRNA target sequence for MGC56946 (NM_198656.1,1105-1123).
ccaagggttgttaagtatt

SEQ ID NO: 814379 - DNA, 19 bp, Mus musculus
  siRNA target sequence for MGC56946 (NM_198656.1,1106-1124).
caagggttgttaagtatta

SEQ ID NO: 814380 - DNA, 19 bp, Mus musculus
  siRNA target sequence for MGC56946 (NM_198656.1,1184-1202).
caggagcagctcttcgttt

SEQ ID NO: 814381 - DNA, 19 bp, Mus musculus
  siRNA target sequence for MGC56946 (NM_198656.1,1187-1205).
gagcagctcttcgtttgta

SEQ ID NO: 814382 - DNA, 19 bp, Mus musculus
  siRNA target sequence for MGC56946 (NM_198656.1,1341-1359).
ccatccagctgggatactt

SEQ ID NO: 814383 - DNA, 19 bp, Mus musculus
  siRNA target sequence for MGC56946 (NM_198656.1,1349-1367).
ctgggatacttcaatgcta

SEQ ID NO: 814384 - DNA, 19 bp, Mus musculus
  siRNA target sequence for MGC56946 (NM_198656.1,1385-1403).
gacagccagataagataca

SEQ ID NO: 814385 - DNA, 19 bp, Mus musculus
  siRNA target sequence for MGC56946 (NM_198656.1,1398-1416).
gatacaaactggttcatga

SEQ ID NO: 814386 - DNA, 19 bp, Mus musculus
  siRNA target sequence for MGC56946 (NM_198656.1,1408-1426).
ggttcatgatccagaaaat

SEQ ID NO: 814387 - DNA, 19 bp, Mus musculus
  siRNA target sequence for MGC56946 (NM_198656.1,1482-1500).
gggagtcccctcatgtgaa

SEQ ID NO: 814388 - DNA, 19 bp, Mus musculus
  siRNA target sequence for MGC56946 (NM_198656.1,1498-1516).
gaatgacagtttctataca

SEQ ID NO: 814389 - DNA, 19 bp, Mus musculus
  siRNA target sequence for MGC56946 (NM_198656.1,1502-1520).
gacagtttctatacaatca

SEQ ID NO: 814390 - DNA, 19 bp, Mus musculus
  siRNA target sequence for MGC56946 (NM_198656.1,1567-1585).
gactctgatgcttttccta

SEQ ID NO: 814391 - DNA, 19 bp, Mus musculus
  siRNA target sequence for MGC56946 (NM_198656.1,1705-1723).
cgctgacccctttactttt

SEQ ID NO: 814392 - DNA, 19 bp, Mus musculus
  siRNA target sequence for MGC56946 (NM_198656.1,1709-1727).
gacccctttacttttgatt

SEQ ID NO: 814393 - DNA, 19 bp, Mus musculus
  siRNA target sequence for MGC56946 (NM_198656.1,2026-2044).
gtgctcctgcacatttgga

SEQ ID NO: 814394 - DNA, 19 bp, Mus musculus
  siRNA target sequence for MGC56946 (NM_198656.1,2086-2104).
ccagacactgattgtgtat

SEQ ID NO: 814395 - DNA, 19 bp, Mus musculus
  siRNA target sequence for MGC56946 (NM_198656.1,2091-2109).
cactgattgtgtataacga

SEQ ID NO: 814396 - DNA, 19 bp, Mus musculus
  siRNA target sequence for MGC56946 (NM_198656.1,2101-2119).
gtataacgaggaaagcaaa

SEQ ID NO: 814397 - DNA, 19 bp, Mus musculus
  siRNA target sequence for MGC56946 (NM_198656.1,2134-2152).
gggttgtgacactttcttt

SEQ ID NO: 814398 - DNA, 19 bp, Mus musculus
  siRNA target sequence for MGC56946 (NM_198656.1,2136-2154).
gttgtgacactttctttga

SEQ ID NO: 814399 - DNA, 19 bp, Mus musculus
  siRNA target sequence for MGC56946 (NM_198656.1,2190-2208).
cggtctatctggatcgtat

SEQ ID NO: 814400 - DNA, 19 bp, Mus musculus
  siRNA target sequence for MGC56946 (NM_198656.1,2266-2284).
ccagaagctccagagtatt

SEQ ID NO: 814401 - DNA, 19 bp, Mus musculus
  siRNA target sequence for MGC56946 (NM_198656.1,2269-2287).
gaagctccagagtattgat

SEQ ID NO: 814402 - DNA, 19 bp, Mus musculus
  siRNA target sequence for MGC56946 (NM_198656.1,2307-2325).
gctacctgcctcatgttta

SEQ ID NO: 814403 - DNA, 19 bp, Mus musculus
  siRNA target sequence for MGC56946 (NM_198656.1,2408-2426).
ggctgctcgggctcaaaat

SEQ ID NO: 814404 - DNA, 19 bp, Mus musculus
  siRNA target sequence for MGC56946 (NM_198656.1,2413-2431).
ctcgggctcaaaatctact

SEQ ID NO: 814405 - DNA, 19 bp, Mus musculus
  siRNA target sequence for MGC56946 (NM_198656.1,2427-2445).
ctactccctctgaagcaat

SEQ ID NO: 814406 - DNA, 19 bp, Mus musculus
  siRNA target sequence for MGC56946 (NM_198656.1,2433-2451).
cctctgaagcaatgtgttt

SEQ ID NO: 814407 - DNA, 19 bp, Mus musculus
  siRNA target sequence for LOC381438 (NM_198657.1,695-713).
gcattccaccatgtcttat

SEQ ID NO: 814408 - DNA, 19 bp, Mus musculus
  siRNA target sequence for LOC381438 (NM_198657.1,725-743).
ccagccatctgccagtata

SEQ ID NO: 814409 - DNA, 19 bp, Mus musculus
  siRNA target sequence for LOC381438 (NM_198657.1,733-751).
ctgccagtatacaatacat

SEQ ID NO: 814410 - DNA, 19 bp, Mus musculus
  siRNA target sequence for Fxrb (NM_198658.1,147-165).
cgctgaacccacacagtat

SEQ ID NO: 814411 - DNA, 19 bp, Mus musculus
  siRNA target sequence for Fxrb (NM_198658.1,148-166).
gctgaacccacacagtatt

SEQ ID NO: 814412 - DNA, 19 bp, Mus musculus
  siRNA target sequence for Fxrb (NM_198658.1,154-172).
cccacacagtattatgata

SEQ ID NO: 814413 - DNA, 19 bp, Mus musculus
  siRNA target sequence for Fxrb (NM_198658.1,156-174).
cacacagtattatgatatt

SEQ ID NO: 814414 - DNA, 19 bp, Mus musculus
  siRNA target sequence for Fxrb (NM_198658.1,169-187).
gatattttgccagaacaat

SEQ ID NO: 814415 - DNA, 19 bp, Mus musculus
  siRNA target sequence for Fxrb (NM_198658.1,196-214).
cagctgtgtgatacagatt

SEQ ID NO: 814416 - DNA, 19 bp, Mus musculus
  siRNA target sequence for Fxrb (NM_198658.1,201-219).
gtgtgatacagatttccaa

SEQ ID NO: 814417 - DNA, 19 bp, Mus musculus
  siRNA target sequence for Fxrb (NM_198658.1,220-238).
gaaccaccctattgtcaat

SEQ ID NO: 814418 - DNA, 19 bp, Mus musculus
  siRNA target sequence for Fxrb (NM_198658.1,226-244).
ccctattgtcaatattcta

SEQ ID NO: 814419 - DNA, 19 bp, Mus musculus
  siRNA target sequence for Fxrb (NM_198658.1,263-281).
cgttacagtccccatcttt

SEQ ID NO: 814420 - DNA, 19 bp, Mus musculus
  siRNA target sequence for Fxrb (NM_198658.1,264-282).
gttacagtccccatcttta

SEQ ID NO: 814421 - DNA, 19 bp, Mus musculus
  siRNA target sequence for Fxrb (NM_198658.1,359-377).
ctggtcagtccacttatgt

SEQ ID NO: 814422 - DNA, 19 bp, Mus musculus
  siRNA target sequence for Fxrb (NM_198658.1,378-396).
ggttgttcacgatgatgaa

SEQ ID NO: 814423 - DNA, 19 bp, Mus musculus
  siRNA target sequence for Fxrb (NM_198658.1,446-464).
ggaagggtcaagatgacat

SEQ ID NO: 814424 - DNA, 19 bp, Mus musculus
  siRNA target sequence for Fxrb (NM_198658.1,470-488).
gcatggtctgcggtgataa

SEQ ID NO: 814425 - DNA, 19 bp, Mus musculus
  siRNA target sequence for Fxrb (NM_198658.1,491-509).
catcaggatatcactacaa

SEQ ID NO: 814426 - DNA, 19 bp, Mus musculus
  siRNA target sequence for Fxrb (NM_198658.1,596-614).
gtgaaatggacatgtacat

SEQ ID NO: 814427 - DNA, 19 bp, Mus musculus
  siRNA target sequence for Fxrb (NM_198658.1,710-728).
gacttcgcaagaacttcaa

SEQ ID NO: 814428 - DNA, 19 bp, Mus musculus
  siRNA target sequence for Fxrb (NM_198658.1,825-843).
ggacaacatgactctaact

SEQ ID NO: 814429 - DNA, 19 bp, Mus musculus
  siRNA target sequence for Fxrb (NM_198658.1,828-846).
caacatgactctaactcaa

SEQ ID NO: 814430 - DNA, 19 bp, Mus musculus
  siRNA target sequence for Fxrb (NM_198658.1,850-868).
gaacatcggcttctgaata

SEQ ID NO: 814431 - DNA, 19 bp, Mus musculus
  siRNA target sequence for Fxrb (NM_198658.1,934-952).
ggttccaaccccgaactaa

SEQ ID NO: 814432 - DNA, 19 bp, Mus musculus
  siRNA target sequence for Fxrb (NM_198658.1,938-956).
ccaaccccgaactaagttt

SEQ ID NO: 814433 - DNA, 19 bp, Mus musculus
  siRNA target sequence for Fxrb (NM_198658.1,939-957).
caaccccgaactaagtttt

SEQ ID NO: 814434 - DNA, 19 bp, Mus musculus
  siRNA target sequence for Fxrb (NM_198658.1,985-1003).
cacatacaagggctaatga

SEQ ID NO: 814435 - DNA, 19 bp, Mus musculus
  siRNA target sequence for Fxrb (NM_198658.1,991-1009).
caagggctaatgaagttta

SEQ ID NO: 814436 - DNA, 19 bp, Mus musculus
  siRNA target sequence for Fxrb (NM_198658.1,1014-1032).
gggactcccaggatttgaa

SEQ ID NO: 814437 - DNA, 19 bp, Mus musculus
  siRNA target sequence for Fxrb (NM_198658.1,1015-1033).
ggactcccaggatttgaaa

SEQ ID NO: 814438 - DNA, 19 bp, Mus musculus
  siRNA target sequence for Fxrb (NM_198658.1,1020-1038).
cccaggatttgaaaattta

SEQ ID NO: 814439 - DNA, 19 bp, Mus musculus
  siRNA target sequence for Fxrb (NM_198658.1,1065-1083).
gaaggcgtcaaaaactgaa

SEQ ID NO: 814440 - DNA, 19 bp, Mus musculus
  siRNA target sequence for Fxrb (NM_198658.1,1070-1088).
cgtcaaaaactgaagtgat

SEQ ID NO: 814441 - DNA, 19 bp, Mus musculus
  siRNA target sequence for Fxrb (NM_198658.1,1170-1188).
gacactagaggtgcataat

SEQ ID NO: 814442 - DNA, 19 bp, Mus musculus
  siRNA target sequence for Fxrb (NM_198658.1,1174-1192).
ctagaggtgcataatccta

SEQ ID NO: 814443 - DNA, 19 bp, Mus musculus
  siRNA target sequence for Fxrb (NM_198658.1,1190-1208).
ctagcgctgatgaaagtgt

SEQ ID NO: 814444 - DNA, 19 bp, Mus musculus
  siRNA target sequence for Fxrb (NM_198658.1,1195-1213).
gctgatgaaagtgttcatt

SEQ ID NO: 814445 - DNA, 19 bp, Mus musculus
  siRNA target sequence for Fxrb (NM_198658.1,1207-1225).
gttcattctccggaaaact

SEQ ID NO: 814446 - DNA, 19 bp, Mus musculus
  siRNA target sequence for Fxrb (NM_198658.1,1242-1260).
cccttcggctcctctaact

SEQ ID NO: 814447 - DNA, 19 bp, Mus musculus
  siRNA target sequence for Fxrb (NM_198658.1,1249-1267).
gctcctctaactgatatta

SEQ ID NO: 814448 - DNA, 19 bp, Mus musculus
  siRNA target sequence for Fxrb (NM_198658.1,1252-1270).
cctctaactgatattacta

SEQ ID NO: 814449 - DNA, 19 bp, Mus musculus
  siRNA target sequence for Fxrb (NM_198658.1,1261-1279).
gatattactaaagaattta

SEQ ID NO: 814450 - DNA, 19 bp, Mus musculus
  siRNA target sequence for Fxrb (NM_198658.1,1282-1300).
gcctcactatcttacttct

SEQ ID NO: 814451 - DNA, 19 bp, Mus musculus
  siRNA target sequence for Fxrb (NM_198658.1,1292-1310).
cttacttctacagaagaat

SEQ ID NO: 814452 - DNA, 19 bp, Mus musculus
  siRNA target sequence for Fxrb (NM_198658.1,1321-1339).
catgtatcggatactgaat

SEQ ID NO: 814453 - DNA, 19 bp, Mus musculus
  siRNA target sequence for Fxrb (NM_198658.1,1352-1370).
cggcgacaacagtgctttt

SEQ ID NO: 814454 - DNA, 19 bp, Mus musculus
  siRNA target sequence for Fxrb (NM_198658.1,1354-1372).
gcgacaacagtgcttttct

SEQ ID NO: 814455 - DNA, 19 bp, Mus musculus
  siRNA target sequence for Fxrb (NM_198658.1,1375-1393).
gatcgtccatgccttaaaa

SEQ ID NO: 814456 - DNA, 19 bp, Mus musculus
  siRNA target sequence for Fxrb (NM_198658.1,1378-1396).
cgtccatgccttaaaaata

SEQ ID NO: 814457 - DNA, 19 bp, Mus musculus
  siRNA target sequence for Fxrb (NM_198658.1,1426-1444).
gtcctgcaacttttgttta

SEQ ID NO: 814458 - DNA, 19 bp, Mus musculus
  siRNA target sequence for Fxrb (NM_198658.1,1494-1512).
catagggaggcttactgaa

SEQ ID NO: 814459 - DNA, 19 bp, Mus musculus
  siRNA target sequence for Fxrb (NM_198658.1,1569-1587).
ccccaggttggtgatgtta

SEQ ID NO: 814460 - DNA, 19 bp, Mus musculus
  siRNA target sequence for LOC381476 (NM_198659.1,78-96).
ggacctaccaggtaccttt

SEQ ID NO: 814461 - DNA, 19 bp, Mus musculus
  siRNA target sequence for LOC381476 (NM_198659.1,79-97).
gacctaccaggtacctttt

SEQ ID NO: 814462 - DNA, 19 bp, Mus musculus
  siRNA target sequence for LOC381476 (NM_198659.1,106-124).
gcaggccacaggttgctat

SEQ ID NO: 814463 - DNA, 19 bp, Mus musculus
  siRNA target sequence for LOC381476 (NM_198659.1,117-135).
gttgctatgcaccatttct

SEQ ID NO: 814464 - DNA, 19 bp, Mus musculus
  siRNA target sequence for LOC381476 (NM_198659.1,195-213).
caggtccagcacactacaa

SEQ ID NO: 814465 - DNA, 19 bp, Mus musculus
  siRNA target sequence for LOC381476 (NM_198659.1,204-222).
cacactacaacgtatcaca

SEQ ID NO: 814466 - DNA, 19 bp, Mus musculus
  siRNA target sequence for LOC381476 (NM_198659.1,215-233).
gtatcacaagcacagtata

SEQ ID NO: 814467 - DNA, 19 bp, Mus musculus
  siRNA target sequence for LOC381476 (NM_198659.1,243-261).
gaggccgcagtctgcaaaa

SEQ ID NO: 814468 - DNA, 19 bp, Mus musculus
  siRNA target sequence for LOC381476 (NM_198659.1,263-281).
cgagagaagcgatttaaga

SEQ ID NO: 814469 - DNA, 19 bp, Mus musculus
  siRNA target sequence for LOC381476 (NM_198659.1,271-289).
gcgatttaagaaacttatt

SEQ ID NO: 814470 - DNA, 19 bp, Mus musculus
  siRNA target sequence for LOC381476 (NM_198659.1,302-320).
ggacctgggagctacaatt

SEQ ID NO: 814471 - DNA, 19 bp, Mus musculus
  siRNA target sequence for LOC381476 (NM_198659.1,312-330).
gctacaattggccttatct

SEQ ID NO: 814472 - DNA, 19 bp, Mus musculus
  siRNA target sequence for LOC381476 (NM_198659.1,313-331).
ctacaattggccttatctt

SEQ ID NO: 814473 - DNA, 19 bp, Mus musculus
  siRNA target sequence for LOC381476 (NM_198659.1,322-340).
gccttatcttgggacatta

SEQ ID NO: 814474 - DNA, 19 bp, Mus musculus
  siRNA target sequence for LOC381476 (NM_198659.1,332-350).
gggacattatgtatcacaa

SEQ ID NO: 814475 - DNA, 19 bp, Mus musculus
  siRNA target sequence for LOC381476 (NM_198659.1,426-444).
cacatgggtatcatctcaa

SEQ ID NO: 814476 - DNA, 19 bp, Mus musculus
  siRNA target sequence for LOC381476 (NM_198659.1,442-460).
caatgacgatgacactatt

SEQ ID NO: 814477 - DNA, 19 bp, Mus musculus
  siRNA target sequence for LOC381476 (NM_198659.1,446-464).
gacgatgacactattatga

SEQ ID NO: 814478 - DNA, 19 bp, Mus musculus
  siRNA target sequence for LOC381476 (NM_198659.1,448-466).
cgatgacactattatgaga

SEQ ID NO: 814479 - DNA, 19 bp, Mus musculus
  siRNA target sequence for LOC381476 (NM_198659.1,476-494).
cctcctagtgacaacacaa

SEQ ID NO: 814480 - DNA, 19 bp, Mus musculus
  siRNA target sequence for LOC381476 (NM_198659.1,477-495).
ctcctagtgacaacacaat

SEQ ID NO: 814481 - DNA, 19 bp, Mus musculus
  siRNA target sequence for LOC381476 (NM_198659.1,544-562).
gaaatataaaggcgtaaat

SEQ ID NO: 814482 - DNA, 19 bp, Mus musculus
  siRNA target sequence for LOC381476 (NM_198659.1,557-575).
gtaaattttggcaatgcta

SEQ ID NO: 814483 - DNA, 19 bp, Mus musculus
  siRNA target sequence for LOC381476 (NM_198659.1,578-596).
ggaagacaagaatttctca

SEQ ID NO: 814484 - DNA, 19 bp, Mus musculus
  siRNA target sequence for LOC381476 (NM_198659.1,611-629).
ggtcctggacagtatgata

SEQ ID NO: 814485 - DNA, 19 bp, Mus musculus
  siRNA target sequence for LOC381476 (NM_198659.1,614-632).
cctggacagtatgatatca

SEQ ID NO: 814486 - DNA, 19 bp, Mus musculus
  siRNA target sequence for LOC381476 (NM_198659.1,673-691).
gagagaacaagagcataat

SEQ ID NO: 814487 - DNA, 19 bp, Mus musculus
  siRNA target sequence for LOC381476 (NM_198659.1,683-701).
gagcataattattatacat

SEQ ID NO: 814488 - DNA, 19 bp, Mus musculus
  siRNA target sequence for LOC381476 (NM_198659.1,711-729).
ggctatatgaagcgataat

SEQ ID NO: 814489 - DNA, 19 bp, Mus musculus
  siRNA target sequence for LOC381476 (NM_198659.1,712-730).
gctatatgaagcgataata

SEQ ID NO: 814490 - DNA, 19 bp, Mus musculus
  siRNA target sequence for LOC381476 (NM_198659.1,713-731).
ctatatgaagcgataatat

SEQ ID NO: 814491 - DNA, 19 bp, Mus musculus
  siRNA target sequence for LOC381476 (NM_198659.1,755-773).
ccaggacctggaaagtaca

SEQ ID NO: 814492 - DNA, 19 bp, Mus musculus
  siRNA target sequence for LOC381476 (NM_198659.1,758-776).
ggacctggaaagtacaaca

SEQ ID NO: 814493 - DNA, 19 bp, Mus musculus
  siRNA target sequence for LOC381476 (NM_198659.1,759-777).
gacctggaaagtacaacat

SEQ ID NO: 814494 - DNA, 19 bp, Mus musculus
  siRNA target sequence for LOC381476 (NM_198659.1,761-779).
cctggaaagtacaacatta

SEQ ID NO: 814495 - DNA, 19 bp, Mus musculus
  siRNA target sequence for LOC381476 (NM_198659.1,818-836).
gtgaattctccatctttta

SEQ ID NO: 814496 - DNA, 19 bp, Mus musculus
  siRNA target sequence for LOC381476 (NM_198659.1,820-838).
gaattctccatcttttatt

SEQ ID NO: 814497 - DNA, 19 bp, Mus musculus
  siRNA target sequence for LOC381476 (NM_198659.1,856-874).
gagatttgaacctataaaa

SEQ ID NO: 814498 - DNA, 19 bp, Mus musculus
  siRNA target sequence for LOC381476 (NM_198659.1,884-902).
ccagctcctggcacataca

SEQ ID NO: 814499 - DNA, 19 bp, Mus musculus
  siRNA target sequence for LOC381476 (NM_198659.1,885-903).
cagctcctggcacatacaa

SEQ ID NO: 814500 - DNA, 19 bp, Mus musculus
  siRNA target sequence for LOC381476 (NM_198659.1,888-906).
ctcctggcacatacaatga

SEQ ID NO: 814501 - DNA, 19 bp, Mus musculus
  siRNA target sequence for LOC381476 (NM_198659.1,895-913).
cacatacaatgaaatacga

SEQ ID NO: 814502 - DNA, 19 bp, Mus musculus
  siRNA target sequence for LOC381476 (NM_198659.1,967-985).
gagtgctgctcgattcaca

SEQ ID NO: 814503 - DNA, 19 bp, Mus musculus
  siRNA target sequence for LOC381476 (NM_198659.1,1046-1064).
gtaaaagcccaggttaaaa

SEQ ID NO: 814504 - DNA, 19 bp, Mus musculus
  siRNA target sequence for LOC381476 (NM_198659.1,1107-1125).
ctgtgcctcgaactttgtt

SEQ ID NO: 814505 - DNA, 19 bp, Mus musculus
  siRNA target sequence for LOC381476 (NM_198659.1,1109-1127).
gtgcctcgaactttgttca

SEQ ID NO: 814506 - DNA, 19 bp, Mus musculus
  siRNA target sequence for LOC381476 (NM_198659.1,1126-1144).
cacagctcagaaaaaagct

SEQ ID NO: 814507 - DNA, 19 bp, Mus musculus
  siRNA target sequence for LOC381476 (NM_198659.1,1155-1173).
ctgggcctagtgattatca

SEQ ID NO: 814508 - DNA, 19 bp, Mus musculus
  siRNA target sequence for LOC381476 (NM_198659.1,1174-1192).
ggttcgaggaactcatgat

SEQ ID NO: 814509 - DNA, 19 bp, Mus musculus
  siRNA target sequence for LOC381476 (NM_198659.1,1178-1196).
cgaggaactcatgatgaat

SEQ ID NO: 814510 - DNA, 19 bp, Mus musculus
  siRNA target sequence for LOC381476 (NM_198659.1,1179-1197).
gaggaactcatgatgaatt

SEQ ID NO: 814511 - DNA, 19 bp, Mus musculus
  siRNA target sequence for LOC381476 (NM_198659.1,1193-1211).
gaattacctaacttgaaca

SEQ ID NO: 814512 - DNA, 19 bp, Mus musculus
  siRNA target sequence for LOC381476 (NM_198659.1,1225-1243).
cttgtcgagagcagaaaaa

SEQ ID NO: 814513 - DNA, 19 bp, Mus musculus
  siRNA target sequence for LOC381476 (NM_198659.1,1245-1263).
ctccaccagtacgaaaaat

SEQ ID NO: 814514 - DNA, 19 bp, Mus musculus
  siRNA target sequence for LOC381476 (NM_198659.1,1281-1299).
gccgctatgatgttcagaa

SEQ ID NO: 814515 - DNA, 19 bp, Mus musculus
  siRNA target sequence for LOC381476 (NM_198659.1,1292-1310).
gttcagaaatcgtatgaca

SEQ ID NO: 814516 - DNA, 19 bp, Mus musculus
  siRNA target sequence for LOC381476 (NM_198659.1,1343-1361).
cgtacttcggtggctaaaa

SEQ ID NO: 814517 - DNA, 19 bp, Mus musculus
  siRNA target sequence for LOC381476 (NM_198659.1,1391-1409).
cctcggtgcctgggaaaaa

SEQ ID NO: 814518 - DNA, 19 bp, Mus musculus
  siRNA target sequence for LOC381476 (NM_198659.1,1392-1410).
ctcggtgcctgggaaaaat

SEQ ID NO: 814519 - DNA, 19 bp, Mus musculus
  siRNA target sequence for LOC381476 (NM_198659.1,1419-1437).
ggccaggacctgcaacata

SEQ ID NO: 814520 - DNA, 19 bp, Mus musculus
  siRNA target sequence for LOC381476 (NM_198659.1,1431-1449).
caacatacagtcctgtttt

SEQ ID NO: 814521 - DNA, 19 bp, Mus musculus
  siRNA target sequence for LOC381476 (NM_198659.1,1434-1452).
catacagtcctgttttaat

SEQ ID NO: 814522 - DNA, 19 bp, Mus musculus
  siRNA target sequence for LOC381476 (NM_198659.1,1456-1474).
gtctggtgccataatctca

SEQ ID NO: 814523 - DNA, 19 bp, Mus musculus
  siRNA target sequence for LOC381476 (NM_198659.1,1458-1476).
ctggtgccataatctcatt

SEQ ID NO: 814524 - DNA, 19 bp, Mus musculus
  siRNA target sequence for LOC381476 (NM_198659.1,1463-1481).
gccataatctcattcgtta

SEQ ID NO: 814525 - DNA, 19 bp, Mus musculus
  siRNA target sequence for LOC381476 (NM_198659.1,1464-1482).
ccataatctcattcgttaa

SEQ ID NO: 814526 - DNA, 19 bp, Mus musculus
  siRNA target sequence for LOC381476 (NM_198659.1,1465-1483).
cataatctcattcgttaaa

SEQ ID NO: 814527 - DNA, 19 bp, Mus musculus
  siRNA target sequence for LOC381476 (NM_198659.1,1485-1503).
gaccaaagcgttttcaaga

SEQ ID NO: 814528 - DNA, 19 bp, Mus musculus
  siRNA target sequence for LOC381476 (NM_198659.1,1492-1510).
gcgttttcaagagtttcat

SEQ ID NO: 814529 - DNA, 19 bp, Mus musculus
  siRNA target sequence for LOC381476 (NM_198659.1,1502-1520).
gagtttcatggcgagtttt

SEQ ID NO: 814530 - DNA, 19 bp, Mus musculus
  siRNA target sequence for LOC381476 (NM_198659.1,1504-1522).
gtttcatggcgagttttct

SEQ ID NO: 814531 - DNA, 19 bp, Mus musculus
  siRNA target sequence for LOC381476 (NM_198659.1,1524-1542).
caggccctacgacatatga

SEQ ID NO: 814532 - DNA, 19 bp, Mus musculus
  siRNA target sequence for LOC381476 (NM_198659.1,1600-1618).
gtgttcatcctctcctaat

SEQ ID NO: 814533 - DNA, 19 bp, Mus musculus
  siRNA target sequence for LOC381476 (NM_198659.1,1609-1627).
ctctcctaatagagaaaat

SEQ ID NO: 814534 - DNA, 19 bp, Mus musculus
  siRNA target sequence for LOC381476 (NM_198659.1,1629-1647).
ctggttgtccatcacaaaa

SEQ ID NO: 814535 - DNA, 19 bp, Mus musculus
  siRNA target sequence for LOC381476 (NM_198659.1,1649-1667).
gccacacaaaaatttcaaa

SEQ ID NO: 814536 - DNA, 19 bp, Mus musculus
  siRNA target sequence for LOC381522 (NM_198660.1,819-837).
ctcgagccgacaagctaaa

SEQ ID NO: 814537 - DNA, 19 bp, Mus musculus
  siRNA target sequence for LOC381522 (NM_198660.1,822-840).
gagccgacaagctaaagga

SEQ ID NO: 814538 - DNA, 19 bp, Mus musculus
  siRNA target sequence for LOC381522 (NM_198660.1,850-868).
gagatatgtcggcatcata

SEQ ID NO: 814539 - DNA, 19 bp, Mus musculus
  siRNA target sequence for LOC381522 (NM_198660.1,852-870).
gatatgtcggcatcataga

SEQ ID NO: 814540 - DNA, 19 bp, Mus musculus
  siRNA target sequence for LOC381522 (NM_198660.1,887-905).
ctgcagcccgatgtgtata

SEQ ID NO: 814541 - DNA, 19 bp, Mus musculus
  siRNA target sequence for LOC381522 (NM_198660.1,899-917).
gtgtataggctgatagata

SEQ ID NO: 814542 - DNA, 19 bp, Mus musculus
  siRNA target sequence for LOC381522 (NM_198660.1,1242-1260).
cccagttgactgaatggta

SEQ ID NO: 814543 - DNA, 19 bp, Mus musculus
  siRNA target sequence for LOC381522 (NM_198660.1,1243-1261).
ccagttgactgaatggtat

SEQ ID NO: 814544 - DNA, 19 bp, Mus musculus
  siRNA target sequence for LOC381522 (NM_198660.1,1362-1380).
cccacgtgcaggaatgcaa

SEQ ID NO: 814545 - DNA, 19 bp, Mus musculus
  siRNA target sequence for LOC381522 (NM_198660.1,1418-1436).
gaggcagagagcctagtaa

SEQ ID NO: 814546 - DNA, 19 bp, Mus musculus
  siRNA target sequence for LOC381522 (NM_198660.1,1420-1438).
ggcagagagcctagtaaat

SEQ ID NO: 814547 - DNA, 19 bp, Mus musculus
  siRNA target sequence for LOC381522 (NM_198660.1,1424-1442).
gagagcctagtaaatccaa

SEQ ID NO: 814548 - DNA, 19 bp, Mus musculus
  siRNA target sequence for LOC381522 (NM_198660.1,1588-1606).
ggaggggcaccaaagtgtt

SEQ ID NO: 814549 - DNA, 19 bp, Mus musculus
  siRNA target sequence for LOC381572 (NM_198662.1,143-161).
ccacttccttacgattgat

SEQ ID NO: 814550 - DNA, 19 bp, Mus musculus
  siRNA target sequence for LOC381572 (NM_198662.1,226-244).
ccacatgggggcatatact

SEQ ID NO: 814551 - DNA, 19 bp, Mus musculus
  siRNA target sequence for LOC381572 (NM_198662.1,235-253).
ggcatatactcgagaagat

SEQ ID NO: 814552 - DNA, 19 bp, Mus musculus
  siRNA target sequence for LOC381572 (NM_198662.1,237-255).
catatactcgagaagatga

SEQ ID NO: 814553 - DNA, 19 bp, Mus musculus
  siRNA target sequence for LOC381572 (NM_198662.1,403-421).
gaggcatcctctttttcca

SEQ ID NO: 814554 - DNA, 19 bp, Mus musculus
  siRNA target sequence for LOC381572 (NM_198662.1,549-567).
ctataccatgactgcataa

SEQ ID NO: 814555 - DNA, 19 bp, Mus musculus
  siRNA target sequence for LOC381572 (NM_198662.1,669-687).
gtcactcagaccttgttga

SEQ ID NO: 814556 - DNA, 19 bp, Mus musculus
  siRNA target sequence for LOC381572 (NM_198662.1,675-693).
cagaccttgttgagtagaa

SEQ ID NO: 814557 - DNA, 19 bp, Mus musculus
  siRNA target sequence for LOC381572 (NM_198662.1,733-751).
caattctgcaggcatttta

SEQ ID NO: 814558 - DNA, 19 bp, Mus musculus
  siRNA target sequence for LOC381572 (NM_198662.1,803-821).
ggatttcatgattacttgt

SEQ ID NO: 814559 - DNA, 19 bp, Mus musculus
  siRNA target sequence for LOC381572 (NM_198662.1,866-884).
gttgacaggtgcctgtata

SEQ ID NO: 814560 - DNA, 19 bp, Mus musculus
  siRNA target sequence for LOC381572 (NM_198662.1,969-987).
gagtcacctgcacctttta

SEQ ID NO: 814561 - DNA, 19 bp, Mus musculus
  siRNA target sequence for LOC381572 (NM_198662.1,971-989).
gtcacctgcaccttttaat

SEQ ID NO: 814562 - DNA, 19 bp, Mus musculus
  siRNA target sequence for LOC381572 (NM_198662.1,973-991).
cacctgcaccttttaatga

SEQ ID NO: 814563 - DNA, 19 bp, Mus musculus
  siRNA target sequence for LOC381572 (NM_198662.1,1014-1032).
catgccatgaatatagaca

SEQ ID NO: 814564 - DNA, 19 bp, Mus musculus
  siRNA target sequence for LOC381572 (NM_198662.1,1017-1035).
gccatgaatatagacattt

SEQ ID NO: 814565 - DNA, 19 bp, Mus musculus
  siRNA target sequence for LOC381572 (NM_198662.1,1039-1057).
ccctcgtagcagatgataa

SEQ ID NO: 814566 - DNA, 19 bp, Mus musculus
  siRNA target sequence for LOC381572 (NM_198662.1,1041-1059).
ctcgtagcagatgataaaa

SEQ ID NO: 814567 - DNA, 19 bp, Mus musculus
  siRNA target sequence for LOC381572 (NM_198662.1,1103-1121).
ggacattatccgtgatgat

SEQ ID NO: 814568 - DNA, 19 bp, Mus musculus
  siRNA target sequence for C87499 (NM_198663.1,65-83).
ccgatcggcatgactcttt

SEQ ID NO: 814569 - DNA, 19 bp, Mus musculus
  siRNA target sequence for C87499 (NM_198663.1,66-84).
cgatcggcatgactcttta

SEQ ID NO: 814570 - DNA, 19 bp, Mus musculus
  siRNA target sequence for C87499 (NM_198663.1,246-264).
gaccttaagggccatgata

SEQ ID NO: 814571 - DNA, 19 bp, Mus musculus
  siRNA target sequence for C87499 (NM_198663.1,289-307).
cctgtaggaacgctgataa

SEQ ID NO: 814572 - DNA, 19 bp, Mus musculus
  siRNA target sequence for C87499 (NM_198663.1,649-667).
cagattcagggcttatcca

SEQ ID NO: 814573 - DNA, 19 bp, Mus musculus
  siRNA target sequence for C87499 (NM_198663.1,651-669).
gattcagggcttatccaaa

SEQ ID NO: 814574 - DNA, 19 bp, Mus musculus
  siRNA target sequence for C87499 (NM_198663.1,670-688).
gacgcattcatagaaatct

SEQ ID NO: 814575 - DNA, 19 bp, Mus musculus
  siRNA target sequence for C87499 (NM_198663.1,797-815).
ctctcaagctagatgacat

SEQ ID NO: 814576 - DNA, 19 bp, Mus musculus
  siRNA target sequence for C87499 (NM_198663.1,863-881).
ggcgcaagttgatttctca

SEQ ID NO: 814577 - DNA, 19 bp, Mus musculus
  siRNA target sequence for C87499 (NM_198663.1,932-950).
cagaaggaaatatgataga

SEQ ID NO: 814578 - DNA, 19 bp, Mus musculus
  siRNA target sequence for C87499 (NM_198663.1,1176-1194).
gacggaccgtcatttcagt

SEQ ID NO: 814579 - DNA, 19 bp, Mus musculus
  siRNA target sequence for C87499 (NM_198663.1,1220-1238).
gctcccacctcacaaagat

SEQ ID NO: 814580 - DNA, 19 bp, Mus musculus
  siRNA target sequence for C87499 (NM_198663.1,1267-1285).
cctgttctgaaacaacttt

SEQ ID NO: 814581 - DNA, 19 bp, Mus musculus
  siRNA target sequence for C87499 (NM_198663.1,1356-1374).
catgcgtggagttgaaaca

SEQ ID NO: 814582 - DNA, 19 bp, Mus musculus
  siRNA target sequence for C87499 (NM_198663.1,1435-1453).
gagagagttgcctttgcta

SEQ ID NO: 814583 - DNA, 19 bp, Mus musculus
  siRNA target sequence for C87499 (NM_198663.1,1450-1468).
gctacatcccgttgcatta

SEQ ID NO: 814584 - DNA, 19 bp, Mus musculus
  siRNA target sequence for C87499 (NM_198663.1,1451-1469).
ctacatcccgttgcattaa

SEQ ID NO: 814585 - DNA, 19 bp, Mus musculus
  siRNA target sequence for LOC381605 (NM_198664.1,313-331).
ctctgtgggtatttaagta

SEQ ID NO: 814586 - DNA, 19 bp, Mus musculus
  siRNA target sequence for LOC381605 (NM_198664.1,317-335).
gtgggtatttaagtaagtt

SEQ ID NO: 814587 - DNA, 19 bp, Mus musculus
  siRNA target sequence for LOC381605 (NM_198664.1,392-410).
ggaagtgccacctgtatta

SEQ ID NO: 814588 - DNA, 19 bp, Mus musculus
  siRNA target sequence for LOC381605 (NM_198664.1,393-411).
gaagtgccacctgtattat

SEQ ID NO: 814589 - DNA, 19 bp, Mus musculus
  siRNA target sequence for LOC381605 (NM_198664.1,416-434).
gcaccgcgcaggatgcaaa

SEQ ID NO: 814590 - DNA, 19 bp, Mus musculus
  siRNA target sequence for LOC381605 (NM_198664.1,461-479).
gtgcggtctttgactgtaa

SEQ ID NO: 814591 - DNA, 19 bp, Mus musculus
  siRNA target sequence for LOC381605 (NM_198664.1,492-510).
ggaggagggcacttttgaa

SEQ ID NO: 814592 - DNA, 19 bp, Mus musculus
  siRNA target sequence for LOC381605 (NM_198664.1,496-514).
gagggcacttttgaaatca

SEQ ID NO: 814593 - DNA, 19 bp, Mus musculus
  siRNA target sequence for LOC381605 (NM_198664.1,665-683).
ccaccctgcacctcaaact

SEQ ID NO: 814594 - DNA, 19 bp, Mus musculus
  siRNA target sequence for LOC381605 (NM_198664.1,666-684).
caccctgcacctcaaacta

SEQ ID NO: 814595 - DNA, 19 bp, Mus musculus
  siRNA target sequence for LOC381605 (NM_198664.1,714-732).
cctgtgccctgtgaaaaca

SEQ ID NO: 814596 - DNA, 19 bp, Mus musculus
  siRNA target sequence for LOC381605 (NM_198664.1,832-850).
caggctgtgggagtagtaa

SEQ ID NO: 814597 - DNA, 19 bp, Mus musculus
  siRNA target sequence for LOC381673 (NM_198665.1,238-256).
ccccatgtcagagaaaact

SEQ ID NO: 814598 - DNA, 19 bp, Mus musculus
  siRNA target sequence for LOC381673 (NM_198665.1,275-293).
gagtagagtgccaaccatt

SEQ ID NO: 814599 - DNA, 19 bp, Mus musculus
  siRNA target sequence for LOC381673 (NM_198665.1,315-333).
cctcctcagaggtctaaca

SEQ ID NO: 814600 - DNA, 19 bp, Mus musculus
  siRNA target sequence for LOC381673 (NM_198665.1,316-334).
ctcctcagaggtctaacaa

SEQ ID NO: 814601 - DNA, 19 bp, Mus musculus
  siRNA target sequence for LOC381673 (NM_198665.1,318-336).
cctcagaggtctaacaact

SEQ ID NO: 814602 - DNA, 19 bp, Mus musculus
  siRNA target sequence for BC061212 (NM_198667.1,1512-1530).
ggcaagagagccagacttt

SEQ ID NO: 814603 - DNA, 19 bp, Mus musculus
  siRNA target sequence for LOC381798 (NM_198668.1,531-549).
gagaactgtacctgcaata

SEQ ID NO: 814604 - DNA, 19 bp, Mus musculus
  siRNA target sequence for LOC381798 (NM_198668.1,533-551).
gaactgtacctgcaatact

SEQ ID NO: 814605 - DNA, 19 bp, Mus musculus
  siRNA target sequence for LOC381798 (NM_198668.1,605-623).
cgcaactcgggcatttcca

SEQ ID NO: 814606 - DNA, 19 bp, Mus musculus
  siRNA target sequence for LOC381798 (NM_198668.1,606-624).
gcaactcgggcatttccat

SEQ ID NO: 814607 - DNA, 19 bp, Mus musculus
  siRNA target sequence for LOC381798 (NM_198668.1,625-643).
cccaaagggcattaggaat

SEQ ID NO: 814608 - DNA, 19 bp, Mus musculus
  siRNA target sequence for LOC381798 (NM_198668.1,626-644).
ccaaagggcattaggaata

SEQ ID NO: 814609 - DNA, 19 bp, Mus musculus
  siRNA target sequence for LOC381798 (NM_198668.1,627-645).
caaagggcattaggaatat

SEQ ID NO: 814610 - DNA, 19 bp, Mus musculus
  siRNA target sequence for LOC381798 (NM_198668.1,709-727).
ggatctggtggtcactttt

SEQ ID NO: 814611 - DNA, 19 bp, Mus musculus
  siRNA target sequence for LOC381798 (NM_198668.1,1088-1106).
gttgggaaaagctgtttaa

SEQ ID NO: 814612 - DNA, 19 bp, Mus musculus
  siRNA target sequence for LOC381798 (NM_198668.1,1175-1193).
ctggtctaccagacttcta

SEQ ID NO: 814613 - DNA, 19 bp, Mus musculus
  siRNA target sequence for LOC381798 (NM_198668.1,1177-1195).
ggtctaccagacttctaca

SEQ ID NO: 814614 - DNA, 19 bp, Mus musculus
  siRNA target sequence for LOC381798 (NM_198668.1,1213-1231).
cctctgcacgggaaaggaa

SEQ ID NO: 814615 - DNA, 19 bp, Mus musculus
  siRNA target sequence for LOC381798 (NM_198668.1,1214-1232).
ctctgcacgggaaaggaaa

SEQ ID NO: 814616 - DNA, 19 bp, Mus musculus
  siRNA target sequence for LOC381798 (NM_198668.1,1260-1278).
caaagcccgtggatgatgt

SEQ ID NO: 814617 - DNA, 19 bp, Mus musculus
  siRNA target sequence for LOC381798 (NM_198668.1,1301-1319).
cggacccctcctgaaaaca

SEQ ID NO: 814618 - DNA, 19 bp, Mus musculus
  siRNA target sequence for LOC381798 (NM_198668.1,1358-1376).
gaaaagctgcaggatatgt

SEQ ID NO: 814619 - DNA, 19 bp, Mus musculus
  siRNA target sequence for LOC381798 (NM_198668.1,1369-1387).
ggatatgtgtcgccatata

SEQ ID NO: 814620 - DNA, 19 bp, Mus musculus
  siRNA target sequence for LOC381798 (NM_198668.1,1388-1406).
gaggccgaaaggatcttat

SEQ ID NO: 814621 - DNA, 19 bp, Mus musculus
  siRNA target sequence for LOC381798 (NM_198668.1,1421-1439).
gcctcctgccccatgattt

SEQ ID NO: 814622 - DNA, 19 bp, Mus musculus
  siRNA target sequence for LOC381798 (NM_198668.1,1426-1444).
ctgccccatgatttttcga

SEQ ID NO: 814623 - DNA, 19 bp, Mus musculus
  siRNA target sequence for LOC381798 (NM_198668.1,1428-1446).
gccccatgatttttcgaaa

SEQ ID NO: 814624 - DNA, 19 bp, Mus musculus
  siRNA target sequence for LOC381798 (NM_198668.1,1431-1449).
ccatgatttttcgaaacta

SEQ ID NO: 814625 - DNA, 19 bp, Mus musculus
  siRNA target sequence for LOC381798 (NM_198668.1,1455-1473).
caaggatatcctctcattt

SEQ ID NO: 814626 - DNA, 19 bp, Mus musculus
  siRNA target sequence for LOC381798 (NM_198668.1,1510-1528).
cactacggggactcagatt

SEQ ID NO: 814627 - DNA, 19 bp, Mus musculus
  siRNA target sequence for LOC381798 (NM_198668.1,1610-1628).
cccatcaagctgcattaca

SEQ ID NO: 814628 - DNA, 19 bp, Mus musculus
  siRNA target sequence for LOC381798 (NM_198668.1,1618-1636).
gctgcattacacgttctat

SEQ ID NO: 814629 - DNA, 19 bp, Mus musculus
  siRNA target sequence for LOC381798 (NM_198668.1,1621-1639).
gcattacacgttctatgat

SEQ ID NO: 814630 - DNA, 19 bp, Mus musculus
  siRNA target sequence for LOC381798 (NM_198668.1,1640-1658).
ggttcctccttcatttact

SEQ ID NO: 814631 - DNA, 19 bp, Mus musculus
  siRNA target sequence for LOC381798 (NM_198668.1,1657-1675).
ctatccctcgggaaatatt

SEQ ID NO: 814632 - DNA, 19 bp, Mus musculus
  siRNA target sequence for LOC381798 (NM_198668.1,1772-1790).
ggcctgggctgtgtttact

SEQ ID NO: 814633 - DNA, 19 bp, Mus musculus
  siRNA target sequence for LOC381798 (NM_198668.1,1773-1791).
gcctgggctgtgtttacta

SEQ ID NO: 814634 - DNA, 19 bp, Mus musculus
  siRNA target sequence for LOC381798 (NM_198668.1,2087-2105).
gaaaaggtgtcaaagacaa

SEQ ID NO: 814635 - DNA, 19 bp, Mus musculus
  siRNA target sequence for LOC381798 (NM_198668.1,2111-2129).
gccctggctgagatcaaga

SEQ ID NO: 814636 - DNA, 19 bp, Mus musculus
  siRNA target sequence for LOC381798 (NM_198668.1,2145-2163).
ctgtgactcagtttatgaa

SEQ ID NO: 814637 - DNA, 19 bp, Mus musculus
  siRNA target sequence for LOC381798 (NM_198668.1,2147-2165).
gtgactcagtttatgaact

SEQ ID NO: 814638 - DNA, 19 bp, Mus musculus
  siRNA target sequence for LOC381798 (NM_198668.1,2183-2201).
ggtctgttcaccttagaat

SEQ ID NO: 814639 - DNA, 19 bp, Mus musculus
  siRNA target sequence for LOC381798 (NM_198668.1,2226-2244).
ctagtcgggtcaagttgaa

SEQ ID NO: 814640 - DNA, 19 bp, Mus musculus
  siRNA target sequence for LOC381798 (NM_198668.1,2239-2257).
gttgaaacccgggtctaat

SEQ ID NO: 814641 - DNA, 19 bp, Mus musculus
  siRNA target sequence for LOC381798 (NM_198668.1,2260-2278).
ggatcggatccgtaagaca

SEQ ID NO: 814642 - DNA, 19 bp, Mus musculus
  siRNA target sequence for LOC381798 (NM_198668.1,2261-2279).
gatcggatccgtaagacaa

SEQ ID NO: 814643 - DNA, 19 bp, Mus musculus
  siRNA target sequence for LOC381798 (NM_198668.1,2264-2282).
cggatccgtaagacaagtt

SEQ ID NO: 814644 - DNA, 19 bp, Mus musculus
  siRNA target sequence for LOC381798 (NM_198668.1,2318-2336).
gcccgacaggactccataa

SEQ ID NO: 814645 - DNA, 19 bp, Mus musculus
  siRNA target sequence for LOC381798 (NM_198668.1,2320-2338).
ccgacaggactccataatt

SEQ ID NO: 814646 - DNA, 19 bp, Mus musculus
  siRNA target sequence for LOC381798 (NM_198668.1,2373-2391).
ccttggcccatgttcaaaa

SEQ ID NO: 814647 - DNA, 19 bp, Mus musculus
  siRNA target sequence for LOC381798 (NM_198668.1,2408-2426).
caggtcaaagtcttaccaa

SEQ ID NO: 814648 - DNA, 19 bp, Mus musculus
  siRNA target sequence for LOC381798 (NM_198668.1,2495-2513).
ctgcggaggctcattctca

SEQ ID NO: 814649 - DNA, 19 bp, Mus musculus
  siRNA target sequence for LOC381798 (NM_198668.1,2525-2543).
cgggctggctgcaaatgta

SEQ ID NO: 814650 - DNA, 19 bp, Mus musculus
  siRNA target sequence for LOC381798 (NM_198668.1,2526-2544).
gggctggctgcaaatgtat

SEQ ID NO: 814651 - DNA, 19 bp, Mus musculus
  siRNA target sequence for LOC381798 (NM_198668.1,2527-2545).
ggctggctgcaaatgtatt

SEQ ID NO: 814652 - DNA, 19 bp, Mus musculus
  siRNA target sequence for LOC381798 (NM_198668.1,2615-2633).
gtgctggtatttggaataa

SEQ ID NO: 814653 - DNA, 19 bp, Mus musculus
  siRNA target sequence for LOC381798 (NM_198668.1,2621-2639).
gtatttggaataatgtcta

SEQ ID NO: 814654 - DNA, 19 bp, Mus musculus
  siRNA target sequence for LOC381798 (NM_198668.1,2674-2692).
gctgatggatacactgtat

SEQ ID NO: 814655 - DNA, 19 bp, Mus musculus
  siRNA target sequence for LOC381798 (NM_198668.1,2675-2693).
ctgatggatacactgtata

SEQ ID NO: 814656 - DNA, 19 bp, Mus musculus
  siRNA target sequence for LOC381798 (NM_198668.1,2819-2837).
gtgatacacgggatggttt

SEQ ID NO: 814657 - DNA, 19 bp, Mus musculus
  siRNA target sequence for LOC381798 (NM_198668.1,2847-2865).
ctgggggcaagctcctatt

SEQ ID NO: 814658 - DNA, 19 bp, Mus musculus
  siRNA target sequence for LOC381798 (NM_198668.1,2980-2998).
caagcatgacgcttttaaa

SEQ ID NO: 814659 - DNA, 19 bp, Mus musculus
  siRNA target sequence for LOC381798 (NM_198668.1,2983-3001).
gcatgacgcttttaaagca

SEQ ID NO: 814660 - DNA, 19 bp, Mus musculus
  siRNA target sequence for LOC381798 (NM_198668.1,3094-3112).
cacaaacctggatgatact

SEQ ID NO: 814661 - DNA, 19 bp, Mus musculus
  siRNA target sequence for LOC381798 (NM_198668.1,3107-3125).
gatactgagtcaactaaaa

SEQ ID NO: 814662 - DNA, 19 bp, Mus musculus
  siRNA target sequence for LOC381798 (NM_198668.1,3166-3184).
ggcgcttgtggacaaaata

SEQ ID NO: 814663 - DNA, 19 bp, Mus musculus
  siRNA target sequence for LOC381798 (NM_198668.1,3169-3187).
gcttgtggacaaaatagaa

SEQ ID NO: 814664 - DNA, 19 bp, Mus musculus
  siRNA target sequence for LOC381798 (NM_198668.1,3214-3232).
ggtcaaaccgcctgaaata

SEQ ID NO: 814665 - DNA, 19 bp, Mus musculus
  siRNA target sequence for LOC381798 (NM_198668.1,3217-3235).
caaaccgcctgaaatagaa

SEQ ID NO: 814666 - DNA, 19 bp, Mus musculus
  siRNA target sequence for LOC381798 (NM_198668.1,3276-3294).
ccgctggctttaagaagtt

SEQ ID NO: 814667 - DNA, 19 bp, Mus musculus
  siRNA target sequence for LOC381798 (NM_198668.1,3277-3295).
cgctggctttaagaagtta

SEQ ID NO: 814668 - DNA, 19 bp, Mus musculus
  siRNA target sequence for LOC381798 (NM_198668.1,3278-3296).
gctggctttaagaagttaa

SEQ ID NO: 814669 - DNA, 19 bp, Mus musculus
  siRNA target sequence for LOC381798 (NM_198668.1,3283-3301).
ctttaagaagttaaactct

SEQ ID NO: 814670 - DNA, 19 bp, Mus musculus
  siRNA target sequence for LOC381916 (NM_198670.1,217-235).
cagggacaggccaataagt

SEQ ID NO: 814671 - DNA, 19 bp, Mus musculus
  siRNA target sequence for LOC381916 (NM_198670.1,265-283).
ctatctgtcatcaagttct

SEQ ID NO: 814672 - DNA, 19 bp, Mus musculus
  siRNA target sequence for LOC381916 (NM_198670.1,297-315).
cgtgaggactctggaaaat

SEQ ID NO: 814673 - DNA, 19 bp, Mus musculus
  siRNA target sequence for LOC381916 (NM_198670.1,335-353).
ctgtcttgttggaaaacgt

SEQ ID NO: 814674 - DNA, 19 bp, Mus musculus
  siRNA target sequence for LOC381916 (NM_198670.1,363-381).
gctggatgcctttattgaa

SEQ ID NO: 814675 - DNA, 19 bp, Mus musculus
  siRNA target sequence for LOC381916 (NM_198670.1,451-469).
gaatactcaagggaattta

SEQ ID NO: 814676 - DNA, 19 bp, Mus musculus
  siRNA target sequence for LOC381916 (NM_198670.1,458-476).
caagggaatttaagttcta

SEQ ID NO: 814677 - DNA, 19 bp, Mus musculus
  siRNA target sequence for LOC381916 (NM_198670.1,512-530).
ctgaagttgccgtgaaagt

SEQ ID NO: 814678 - DNA, 19 bp, Mus musculus
  siRNA target sequence for LOC381916 (NM_198670.1,514-532).
gaagttgccgtgaaagtct

SEQ ID NO: 814679 - DNA, 19 bp, Mus musculus
  siRNA target sequence for LOC381916 (NM_198670.1,558-576).
cttgggtctccaagatcaa

SEQ ID NO: 814680 - DNA, 19 bp, Mus musculus
  siRNA target sequence for LOC381916 (NM_198670.1,675-693).
gattgaggataagattcta

SEQ ID NO: 814681 - DNA, 19 bp, Mus musculus
  siRNA target sequence for LOC381916 (NM_198670.1,783-801).
ctctgagaagcaagaaata

SEQ ID NO: 814682 - DNA, 19 bp, Mus musculus
  siRNA target sequence for LOC381916 (NM_198670.1,810-828).
gacagaaacccaaattgat

SEQ ID NO: 814683 - DNA, 19 bp, Mus musculus
  siRNA target sequence for LOC381916 (NM_198670.1,849-867).
gcctgtcgctgttcattct

SEQ ID NO: 814684 - DNA, 19 bp, Mus musculus
  siRNA target sequence for LOC381916 (NM_198670.1,890-908).
ccgacctagcccacattga

SEQ ID NO: 814685 - DNA, 19 bp, Mus musculus
  siRNA target sequence for LOC381916 (NM_198670.1,899-917).
cccacattgagcctatgta

SEQ ID NO: 814686 - DNA, 19 bp, Mus musculus
  siRNA target sequence for LOC381916 (NM_198670.1,951-969).
cgtgcagtctctagcaaat

SEQ ID NO: 814687 - DNA, 19 bp, Mus musculus
  siRNA target sequence for LOC381916 (NM_198670.1,952-970).
gtgcagtctctagcaaata

SEQ ID NO: 814688 - DNA, 19 bp, Mus musculus
  siRNA target sequence for LOC381916 (NM_198670.1,955-973).
cagtctctagcaaatagca

SEQ ID NO: 814689 - DNA, 19 bp, Mus musculus
  siRNA target sequence for LOC381916 (NM_198670.1,961-979).
ctagcaaatagcaacaaga

SEQ ID NO: 814690 - DNA, 19 bp, Mus musculus
  siRNA target sequence for LOC381916 (NM_198670.1,1044-1062).
cgtgtgccgctcactgttt

SEQ ID NO: 814691 - DNA, 19 bp, Mus musculus
  siRNA target sequence for LOC381916 (NM_198670.1,1049-1067).
gccgctcactgtttgagaa

SEQ ID NO: 814692 - DNA, 19 bp, Mus musculus
  siRNA target sequence for LOC381916 (NM_198670.1,1138-1156).
gtttggtacttccttttaa

SEQ ID NO: 814693 - DNA, 19 bp, Mus musculus
  siRNA target sequence for LOC381916 (NM_198670.1,1196-1214).
ctccagaatggttatcaga

SEQ ID NO: 814694 - DNA, 19 bp, Mus musculus
  siRNA target sequence for LOC381916 (NM_198670.1,1218-1236).
gtcatggggtgagattgtt

SEQ ID NO: 814695 - DNA, 19 bp, Mus musculus
  siRNA target sequence for LOC381916 (NM_198670.1,1237-1255).
cgagcttcctccttacaga

SEQ ID NO: 814696 - DNA, 19 bp, Mus musculus
  siRNA target sequence for LOC381916 (NM_198670.1,1238-1256).
gagcttcctccttacagaa

SEQ ID NO: 814697 - DNA, 19 bp, Mus musculus
  siRNA target sequence for LOC381916 (NM_198670.1,1272-1290).
ggaagatgtcatgcaaaat

SEQ ID NO: 814698 - DNA, 19 bp, Mus musculus
  siRNA target sequence for LOC381916 (NM_198670.1,1421-1439).
cagccattcaaaacttcat

SEQ ID NO: 814699 - DNA, 19 bp, Mus musculus
  siRNA target sequence for LOC381916 (NM_198670.1,1464-1482).
catcgaagccccaaccttt

SEQ ID NO: 814700 - DNA, 19 bp, Mus musculus
  siRNA target sequence for LOC381916 (NM_198670.1,1508-1526).
ccagttgctgcgtaccatt

SEQ ID NO: 814701 - DNA, 19 bp, Mus musculus
  siRNA target sequence for LOC381916 (NM_198670.1,1511-1529).
gttgctgcgtaccattgat

SEQ ID NO: 814702 - DNA, 19 bp, Mus musculus
  siRNA target sequence for LOC381916 (NM_198670.1,1514-1532).
gctgcgtaccattgatttt

SEQ ID NO: 814703 - DNA, 19 bp, Mus musculus
  siRNA target sequence for LOC381916 (NM_198670.1,1517-1535).
gcgtaccattgattttcat

SEQ ID NO: 814704 - DNA, 19 bp, Mus musculus
  siRNA target sequence for LOC381916 (NM_198670.1,1518-1536).
cgtaccattgattttcata

SEQ ID NO: 814705 - DNA, 19 bp, Mus musculus
  siRNA target sequence for LOC381916 (NM_198670.1,1640-1658).
gtcctattgctgccaatat

SEQ ID NO: 814706 - DNA, 19 bp, Mus musculus
  siRNA target sequence for LOC381916 (NM_198670.1,1642-1660).
cctattgctgccaatatga

SEQ ID NO: 814707 - DNA, 19 bp, Mus musculus
  siRNA target sequence for LOC381916 (NM_198670.1,1649-1667).
ctgccaatatgatcaacaa

SEQ ID NO: 814708 - DNA, 19 bp, Mus musculus
  siRNA target sequence for LOC381916 (NM_198670.1,1729-1747).
ccagcgttagagaagattt

SEQ ID NO: 814709 - DNA, 19 bp, Mus musculus
  siRNA target sequence for LOC381916 (NM_198670.1,1733-1751).
cgttagagaagatttgtga

SEQ ID NO: 814710 - DNA, 19 bp, Mus musculus
  siRNA target sequence for LOC381916 (NM_198670.1,1791-1809).
gctctggctaactagctat

SEQ ID NO: 814711 - DNA, 19 bp, Mus musculus
  siRNA target sequence for LOC381916 (NM_198670.1,1805-1823).
gctatccatcagagaagtt

SEQ ID NO: 814712 - DNA, 19 bp, Mus musculus
  siRNA target sequence for LOC381916 (NM_198670.1,1905-1923).
cctcaatgacccaatctca

SEQ ID NO: 814713 - DNA, 19 bp, Mus musculus
  siRNA target sequence for LOC381916 (NM_198670.1,1943-1961).
gctgtacaaagccagttat

SEQ ID NO: 814714 - DNA, 19 bp, Mus musculus
  siRNA target sequence for LOC381916 (NM_198670.1,2066-2084).
ctgacctgaggattagcat

SEQ ID NO: 814715 - DNA, 19 bp, Mus musculus
  siRNA target sequence for LOC381916 (NM_198670.1,2100-2118).
gttcctcaatgattacgaa

SEQ ID NO: 814716 - DNA, 19 bp, Mus musculus
  siRNA target sequence for LOC381916 (NM_198670.1,2131-2149).
gaggctctgacctacttga

SEQ ID NO: 814717 - DNA, 19 bp, Mus musculus
  siRNA target sequence for LOC381916 (NM_198670.1,2172-2190).
cagagtgactgatgacaaa

SEQ ID NO: 814718 - DNA, 19 bp, Mus musculus
  siRNA target sequence for LOC381916 (NM_198670.1,2219-2237).
ccatgttctactgtaaaga

SEQ ID NO: 814719 - DNA, 19 bp, Mus musculus
  siRNA target sequence for LOC381916 (NM_198670.1,2242-2260).
gaaacagataactatcaca

SEQ ID NO: 814720 - DNA, 19 bp, Mus musculus
  siRNA target sequence for LOC381916 (NM_198670.1,2563-2581).
gtctataaggagtctatga

SEQ ID NO: 814721 - DNA, 19 bp, Mus musculus
  siRNA target sequence for LOC381916 (NM_198670.1,2574-2592).
gtctatgaacactgttcta

SEQ ID NO: 814722 - DNA, 19 bp, Mus musculus
  siRNA target sequence for LOC381916 (NM_198670.1,2594-2612).
ggcaggagctcatcagatt

SEQ ID NO: 814723 - DNA, 19 bp, Mus musculus
  siRNA target sequence for LOC381916 (NM_198670.1,2596-2614).
caggagctcatcagattca

SEQ ID NO: 814724 - DNA, 19 bp, Mus musculus
  siRNA target sequence for LOC381916 (NM_198670.1,2636-2654).
gcagaagccttattgatct

SEQ ID NO: 814725 - DNA, 19 bp, Mus musculus
  siRNA target sequence for LOC381916 (NM_198670.1,2637-2655).
cagaagccttattgatctt

SEQ ID NO: 814726 - DNA, 19 bp, Mus musculus
  siRNA target sequence for LOC381916 (NM_198670.1,2783-2801).
gctacgtggctgacctatt

SEQ ID NO: 814727 - DNA, 19 bp, Mus musculus
  siRNA target sequence for LOC381916 (NM_198670.1,2830-2848).
gggaatctgggtaattgga

SEQ ID NO: 814728 - DNA, 19 bp, Mus musculus
  siRNA target sequence for BC049697 (NM_198673.1,113-131).
caaggggtccaggaactat

SEQ ID NO: 814729 - DNA, 19 bp, Mus musculus
  siRNA target sequence for BC049697 (NM_198673.1,117-135).
gggtccaggaactatgtgt

SEQ ID NO: 814730 - DNA, 19 bp, Mus musculus
  siRNA target sequence for BC049697 (NM_198673.1,121-139).
ccaggaactatgtgttcta

SEQ ID NO: 814731 - DNA, 19 bp, Mus musculus
  siRNA target sequence for BC049697 (NM_198673.1,168-186).
gtgccctcatggcatgaaa

SEQ ID NO: 814732 - DNA, 19 bp, Mus musculus
  siRNA target sequence for BC049697 (NM_198673.1,203-221).
catcatggccacaatcaaa

SEQ ID NO: 814733 - DNA, 19 bp, Mus musculus
  siRNA target sequence for BC049697 (NM_198673.1,262-280).
gctatatagcccatgacat

SEQ ID NO: 814734 - DNA, 19 bp, Mus musculus
  siRNA target sequence for BC049697 (NM_198673.1,312-330).
catacacggcacactaaga

SEQ ID NO: 814735 - DNA, 19 bp, Mus musculus
  siRNA target sequence for BC049697 (NM_198673.1,323-341).
cactaagaaacggatcata

SEQ ID NO: 814736 - DNA, 19 bp, Mus musculus
  siRNA target sequence for BC049697 (NM_198673.1,329-347).
gaaacggatcatagacata

SEQ ID NO: 814737 - DNA, 19 bp, Mus musculus
  siRNA target sequence for BC049697 (NM_198673.1,333-351).
cggatcatagacataaaca

SEQ ID NO: 814738 - DNA, 19 bp, Mus musculus
  siRNA target sequence for BC049697 (NM_198673.1,357-375).
ggaccttgctatttcttga

SEQ ID NO: 814739 - DNA, 19 bp, Mus musculus
  siRNA target sequence for BC049697 (NM_198673.1,371-389).
cttgaatcccaaagtaact

SEQ ID NO: 814740 - DNA, 19 bp, Mus musculus
  siRNA target sequence for BC049697 (NM_198673.1,384-402).
gtaactcgttttggaatat

SEQ ID NO: 814741 - DNA, 19 bp, Mus musculus
  siRNA target sequence for BC049697 (NM_198673.1,437-455).
ctccaatccacgcataaat

SEQ ID NO: 814742 - DNA, 19 bp, Mus musculus
  siRNA target sequence for BC049697 (NM_198673.1,534-552).
ggctaccggtgtccatata

SEQ ID NO: 814743 - DNA, 19 bp, Mus musculus
  siRNA target sequence for BC049697 (NM_198673.1,536-554).
ctaccggtgtccatataga

SEQ ID NO: 814744 - DNA, 19 bp, Mus musculus
  siRNA target sequence for BC049697 (NM_198673.1,674-692).
ccacaaggagaatatagca

SEQ ID NO: 814745 - DNA, 19 bp, Mus musculus
  siRNA target sequence for BC049697 (NM_198673.1,699-717).
cccggacctgctatgcata

SEQ ID NO: 814746 - DNA, 19 bp, Mus musculus
  siRNA target sequence for BC049697 (NM_198673.1,866-884).
cttcaccatgggcatcaaa

SEQ ID NO: 814747 - DNA, 19 bp, Mus musculus
  siRNA target sequence for BC049697 (NM_198673.1,903-921).
ccactgattgtggacattt

SEQ ID NO: 814748 - DNA, 19 bp, Mus musculus
  siRNA target sequence for LOC382109 (NM_198674.1,1042-1060).
cttctcattggcagaacat

SEQ ID NO: 814749 - DNA, 19 bp, Mus musculus
  siRNA target sequence for LOC382109 (NM_198674.1,1097-1115).
gacgtttttgtgtgttcaa

SEQ ID NO: 814750 - DNA, 19 bp, Mus musculus
  siRNA target sequence for LOC382109 (NM_198674.1,1099-1117).
cgtttttgtgtgttcaact

SEQ ID NO: 814751 - DNA, 19 bp, Mus musculus
  siRNA target sequence for LOC382137 (NM_198675.1,1758-1776).
gcatttcacgagactttat

SEQ ID NO: 814752 - DNA, 19 bp, Mus musculus
  siRNA target sequence for LOC382137 (NM_198675.1,1759-1777).
catttcacgagactttatt

SEQ ID NO: 814753 - DNA, 19 bp, Mus musculus
  siRNA target sequence for LOC382137 (NM_198675.1,1781-1799).
ccttggatttgataacaat

SEQ ID NO: 814754 - DNA, 19 bp, Mus musculus
  siRNA target sequence for LOC382137 (NM_198675.1,1785-1803).
ggatttgataacaatatga

SEQ ID NO: 814755 - DNA, 19 bp, Mus musculus
  siRNA target sequence for LOC382137 (NM_198675.1,1892-1910).
gggcacttcggtggaattt

SEQ ID NO: 814756 - DNA, 19 bp, Mus musculus
  siRNA target sequence for LOC382137 (NM_198675.1,1894-1912).
gcacttcggtggaatttgt

SEQ ID NO: 814757 - DNA, 19 bp, Mus musculus
  siRNA target sequence for LOC382137 (NM_198675.1,1925-1943).
cggaaaggattatataatt

SEQ ID NO: 814758 - DNA, 19 bp, Mus musculus
  siRNA target sequence for LOC382137 (NM_198675.1,1975-1993).
gtgctgagaatctgattat

SEQ ID NO: 814759 - DNA, 19 bp, Mus musculus
  siRNA target sequence for LOC382137 (NM_198675.1,1995-2013).
ggatctattctcacatcta

SEQ ID NO: 814760 - DNA, 19 bp, Mus musculus
  siRNA target sequence for LOC382137 (NM_198675.1,1999-2017).
ctattctcacatctaagat

SEQ ID NO: 814761 - DNA, 19 bp, Mus musculus
  siRNA target sequence for LOC382137 (NM_198675.1,2006-2024).
cacatctaagattgttaaa

SEQ ID NO: 814762 - DNA, 19 bp, Mus musculus
  siRNA target sequence for LOC382137 (NM_198675.1,2015-2033).
gattgttaaacataagcat

SEQ ID NO: 814763 - DNA, 19 bp, Mus musculus
  siRNA target sequence for LOC382137 (NM_198675.1,2063-2081).
ggacttattagttatgctt

SEQ ID NO: 814764 - DNA, 19 bp, Mus musculus
  siRNA target sequence for LOC382137 (NM_198675.1,2073-2091).
gttatgcttgcctatggta

SEQ ID NO: 814765 - DNA, 19 bp, Mus musculus
  siRNA target sequence for LOC382137 (NM_198675.1,2078-2096).
gcttgcctatggtatttct

SEQ ID NO: 814766 - DNA, 19 bp, Mus musculus
  siRNA target sequence for LOC382137 (NM_198675.1,2104-2122).
gaattttgtggacttttga

SEQ ID NO: 814767 - DNA, 19 bp, Mus musculus
  siRNA target sequence for LOC382137 (NM_198675.1,2126-2144).
ccgtttcctgaagagattt

SEQ ID NO: 814768 - DNA, 19 bp, Mus musculus
  siRNA target sequence for LOC382137 (NM_198675.1,2199-2217).
gtgcatgacgttagtttct

SEQ ID NO: 814769 - DNA, 19 bp, Mus musculus
  siRNA target sequence for LOC382137 (NM_198675.1,2360-2378).
gacctatcagacttgtgat

SEQ ID NO: 814770 - DNA, 19 bp, Mus musculus
  siRNA target sequence for LOC382137 (NM_198675.1,2362-2380).
cctatcagacttgtgataa

SEQ ID NO: 814771 - DNA, 19 bp, Mus musculus
  siRNA target sequence for LOC382137 (NM_198675.1,2416-2434).
cccagttcagaaaagagat

SEQ ID NO: 814772 - DNA, 19 bp, Mus musculus
  siRNA target sequence for Scca2-rs1 (NM_198680.1,837-855).
ctactgacaaattactaga

SEQ ID NO: 814773 - DNA, 19 bp, Mus musculus
  siRNA target sequence for Prkwnk1 (NM_198703.1,178-196).
ggcactccgggcttcctta

SEQ ID NO: 814774 - DNA, 19 bp, Mus musculus
  siRNA target sequence for Prkwnk1 (NM_198703.1,239-257).
cttccgtgggcgagaaact

SEQ ID NO: 814775 - DNA, 19 bp, Mus musculus
  siRNA target sequence for Prkwnk1 (NM_198703.1,497-515).
ctcacagagaggaaacttt

SEQ ID NO: 814776 - DNA, 19 bp, Mus musculus
  siRNA target sequence for Prkwnk1 (NM_198703.1,744-762).
gcaacaggatgatatcgaa

SEQ ID NO: 814777 - DNA, 19 bp, Mus musculus
  siRNA target sequence for Prkwnk1 (NM_198703.1,796-814).
gacggtcgctttctcaaat

SEQ ID NO: 814778 - DNA, 19 bp, Mus musculus
  siRNA target sequence for Prkwnk1 (NM_198703.1,798-816).
cggtcgctttctcaaattt

SEQ ID NO: 814779 - DNA, 19 bp, Mus musculus
  siRNA target sequence for Prkwnk1 (NM_198703.1,808-826).
ctcaaatttgacatcgaaa

SEQ ID NO: 814780 - DNA, 19 bp, Mus musculus
  siRNA target sequence for Prkwnk1 (NM_198703.1,829-847).
ggcagaggctcctttaaga

SEQ ID NO: 814781 - DNA, 19 bp, Mus musculus
  siRNA target sequence for Prkwnk1 (NM_198703.1,883-901).
gaagtcgcctggtgtgaat

SEQ ID NO: 814782 - DNA, 19 bp, Mus musculus
  siRNA target sequence for Prkwnk1 (NM_198703.1,896-914).
gtgaattgcaggatcgaaa

SEQ ID NO: 814783 - DNA, 19 bp, Mus musculus
  siRNA target sequence for Prkwnk1 (NM_198703.1,903-921).
gcaggatcgaaagttaaca

SEQ ID NO: 814784 - DNA, 19 bp, Mus musculus
  siRNA target sequence for Prkwnk1 (NM_198703.1,904-922).
caggatcgaaagttaacaa

SEQ ID NO: 814785 - DNA, 19 bp, Mus musculus
  siRNA target sequence for Prkwnk1 (NM_198703.1,906-924).
ggatcgaaagttaacaaaa

SEQ ID NO: 814786 - DNA, 19 bp, Mus musculus
  siRNA target sequence for Prkwnk1 (NM_198703.1,911-929).
gaaagttaacaaaatctga

SEQ ID NO: 814787 - DNA, 19 bp, Mus musculus
  siRNA target sequence for Prkwnk1 (NM_198703.1,984-1002).
cattgttcgattctatgat

SEQ ID NO: 814788 - DNA, 19 bp, Mus musculus
  siRNA target sequence for Prkwnk1 (NM_198703.1,1004-1022).
cctgggaatccacagtaaa

SEQ ID NO: 814789 - DNA, 19 bp, Mus musculus
  siRNA target sequence for Prkwnk1 (NM_198703.1,1125-1143).
ctggtgtcggcaaatcctt

SEQ ID NO: 814790 - DNA, 19 bp, Mus musculus
  siRNA target sequence for Prkwnk1 (NM_198703.1,1127-1145).
ggtgtcggcaaatccttaa

SEQ ID NO: 814791 - DNA, 19 bp, Mus musculus
  siRNA target sequence for Prkwnk1 (NM_198703.1,1128-1146).
gtgtcggcaaatccttaaa

SEQ ID NO: 814792 - DNA, 19 bp, Mus musculus
  siRNA target sequence for Prkwnk1 (NM_198703.1,1164-1182).
cacacgaactccaccaatt

SEQ ID NO: 814793 - DNA, 19 bp, Mus musculus
  siRNA target sequence for Prkwnk1 (NM_198703.1,1166-1184).
cacgaactccaccaattat

SEQ ID NO: 814794 - DNA, 19 bp, Mus musculus
  siRNA target sequence for Prkwnk1 (NM_198703.1,1169-1187).
gaactccaccaattattca

SEQ ID NO: 814795 - DNA, 19 bp, Mus musculus
  siRNA target sequence for Prkwnk1 (NM_198703.1,1252-1270).
cttggtctggcaactctaa

SEQ ID NO: 814796 - DNA, 19 bp, Mus musculus
  siRNA target sequence for Prkwnk1 (NM_198703.1,1265-1283).
ctctaaagcgggcttcttt

SEQ ID NO: 814797 - DNA, 19 bp, Mus musculus
  siRNA target sequence for Prkwnk1 (NM_198703.1,1352-1370).
ccgttgatgtttatgcttt

SEQ ID NO: 814798 - DNA, 19 bp, Mus musculus
  siRNA target sequence for Prkwnk1 (NM_198703.1,1393-1411).
gctacatctgaatatccat

SEQ ID NO: 814799 - DNA, 19 bp, Mus musculus
  siRNA target sequence for Prkwnk1 (NM_198703.1,1475-1493).
gttttgacaaagtagcaat

SEQ ID NO: 814800 - DNA, 19 bp, Mus musculus
  siRNA target sequence for Prkwnk1 (NM_198703.1,1486-1504).
gtagcaattcctgaagtaa

SEQ ID NO: 814801 - DNA, 19 bp, Mus musculus
  siRNA target sequence for Prkwnk1 (NM_198703.1,1523-1541).
gtatccgacaaaacaaaga

SEQ ID NO: 814802 - DNA, 19 bp, Mus musculus
  siRNA target sequence for Prkwnk1 (NM_198703.1,1595-1613).
caggggtacgggtagaatt

SEQ ID NO: 814803 - DNA, 19 bp, Mus musculus
  siRNA target sequence for Prkwnk1 (NM_198703.1,1599-1617).
ggtacgggtagaattagca

SEQ ID NO: 814804 - DNA, 19 bp, Mus musculus
  siRNA target sequence for Prkwnk1 (NM_198703.1,1655-1673).
ggctgcgtattgaagatat

SEQ ID NO: 814805 - DNA, 19 bp, Mus musculus
  siRNA target sequence for Prkwnk1 (NM_198703.1,1656-1674).
gctgcgtattgaagatatt

SEQ ID NO: 814806 - DNA, 19 bp, Mus musculus
  siRNA target sequence for Prkwnk1 (NM_198703.1,1657-1675).
ctgcgtattgaagatatta

SEQ ID NO: 814807 - DNA, 19 bp, Mus musculus
  siRNA target sequence for Prkwnk1 (NM_198703.1,1660-1678).
cgtattgaagatattaaga

SEQ ID NO: 814808 - DNA, 19 bp, Mus musculus
  siRNA target sequence for Prkwnk1 (NM_198703.1,1661-1679).
gtattgaagatattaagaa

SEQ ID NO: 814809 - DNA, 19 bp, Mus musculus
  siRNA target sequence for Prkwnk1 (NM_198703.1,1705-1723).
gaagctattgagttttcct

SEQ ID NO: 814810 - DNA, 19 bp, Mus musculus
  siRNA target sequence for Prkwnk1 (NM_198703.1,1800-1818).
caagaccatggctaaagct

SEQ ID NO: 814811 - DNA, 19 bp, Mus musculus
  siRNA target sequence for Prkwnk1 (NM_198703.1,1805-1823).
ccatggctaaagctatcaa

SEQ ID NO: 814812 - DNA, 19 bp, Mus musculus
  siRNA target sequence for Prkwnk1 (NM_198703.1,1809-1827).
ggctaaagctatcaaagat

SEQ ID NO: 814813 - DNA, 19 bp, Mus musculus
  siRNA target sequence for Prkwnk1 (NM_198703.1,1810-1828).
gctaaagctatcaaagata

SEQ ID NO: 814814 - DNA, 19 bp, Mus musculus
  siRNA target sequence for Prkwnk1 (NM_198703.1,1825-1843).
gatagggtgtccttaatta

SEQ ID NO: 814815 - DNA, 19 bp, Mus musculus
  siRNA target sequence for Prkwnk1 (NM_198703.1,2177-2195).
cctatggttcccaacatga

SEQ ID NO: 814816 - DNA, 19 bp, Mus musculus
  siRNA target sequence for Prkwnk1 (NM_198703.1,2240-2258).
gtatccaagcacaatctca

SEQ ID NO: 814817 - DNA, 19 bp, Mus musculus
  siRNA target sequence for Prkwnk1 (NM_198703.1,2269-2287).
gtgtatccaccctcaagta

SEQ ID NO: 814818 - DNA, 19 bp, Mus musculus
  siRNA target sequence for Prkwnk1 (NM_198703.1,2307-2325).
gggccagccatcaagtagt

SEQ ID NO: 814819 - DNA, 19 bp, Mus musculus
  siRNA target sequence for Prkwnk1 (NM_198703.1,2308-2326).
ggccagccatcaagtagtt

SEQ ID NO: 814820 - DNA, 19 bp, Mus musculus
  siRNA target sequence for Prkwnk1 (NM_198703.1,2309-2327).
gccagccatcaagtagttt

SEQ ID NO: 814821 - DNA, 19 bp, Mus musculus
  siRNA target sequence for Prkwnk1 (NM_198703.1,2373-2391).
gggaatacagccaactgtt

SEQ ID NO: 814822 - DNA, 19 bp, Mus musculus
  siRNA target sequence for Prkwnk1 (NM_198703.1,2382-2400).
gccaactgttccttctcaa

SEQ ID NO: 814823 - DNA, 19 bp, Mus musculus
  siRNA target sequence for Prkwnk1 (NM_198703.1,2541-2559).
catcccagtttcaacacaa

SEQ ID NO: 814824 - DNA, 19 bp, Mus musculus
  siRNA target sequence for Prkwnk1 (NM_198703.1,2608-2626).
cagccaatccctacttctt

SEQ ID NO: 814825 - DNA, 19 bp, Mus musculus
  siRNA target sequence for Prkwnk1 (NM_198703.1,2612-2630).
caatccctacttctttact

SEQ ID NO: 814826 - DNA, 19 bp, Mus musculus
  siRNA target sequence for Prkwnk1 (NM_198703.1,2635-2653).
cagtatcctgtctctcaaa

SEQ ID NO: 814827 - DNA, 19 bp, Mus musculus
  siRNA target sequence for Prkwnk1 (NM_198703.1,2637-2655).
gtatcctgtctctcaaatt

SEQ ID NO: 814828 - DNA, 19 bp, Mus musculus
  siRNA target sequence for Prkwnk1 (NM_198703.1,2682-2700).
ggcgcagacaggtttctca

SEQ ID NO: 814829 - DNA, 19 bp, Mus musculus
  siRNA target sequence for Prkwnk1 (NM_198703.1,2683-2701).
gcgcagacaggtttctcat

SEQ ID NO: 814830 - DNA, 19 bp, Mus musculus
  siRNA target sequence for Prkwnk1 (NM_198703.1,2759-2777).
ctgctacagcatcttcaat

SEQ ID NO: 814831 - DNA, 19 bp, Mus musculus
  siRNA target sequence for Prkwnk1 (NM_198703.1,2786-2804).
gatcacctgtagttcctaa

SEQ ID NO: 814832 - DNA, 19 bp, Mus musculus
  siRNA target sequence for Prkwnk1 (NM_198703.1,2862-2880).
gcttctacagccaacaaca

SEQ ID NO: 814833 - DNA, 19 bp, Mus musculus
  siRNA target sequence for Prkwnk1 (NM_198703.1,2969-2987).
ctcgactgccaccacaata

SEQ ID NO: 814834 - DNA, 19 bp, Mus musculus
  siRNA target sequence for Prkwnk1 (NM_198703.1,3107-3125).
cagtagtgcagccttatgt

SEQ ID NO: 814835 - DNA, 19 bp, Mus musculus
  siRNA target sequence for Prkwnk1 (NM_198703.1,3117-3135).
gccttatgtggaatcaact

SEQ ID NO: 814836 - DNA, 19 bp, Mus musculus
  siRNA target sequence for Prkwnk1 (NM_198703.1,3126-3144).
ggaatcaactcctttggtt

SEQ ID NO: 814837 - DNA, 19 bp, Mus musculus
  siRNA target sequence for Prkwnk1 (NM_198703.1,3131-3149).
caactcctttggttcctat

SEQ ID NO: 814838 - DNA, 19 bp, Mus musculus
  siRNA target sequence for Prkwnk1 (NM_198703.1,3180-3198).
ccaaccagcagtgagttta

SEQ ID NO: 814839 - DNA, 19 bp, Mus musculus
  siRNA target sequence for Prkwnk1 (NM_198703.1,3181-3199).
caaccagcagtgagtttaa

SEQ ID NO: 814840 - DNA, 19 bp, Mus musculus
  siRNA target sequence for Prkwnk1 (NM_198703.1,3274-3292).
ccagaacaaactccaataa

SEQ ID NO: 814841 - DNA, 19 bp, Mus musculus
  siRNA target sequence for Prkwnk1 (NM_198703.1,3354-3372).
cgttgcttctggtatgagt

SEQ ID NO: 814842 - DNA, 19 bp, Mus musculus
  siRNA target sequence for Prkwnk1 (NM_198703.1,3409-3427).
catgaagggaggacaacaa

SEQ ID NO: 814843 - DNA, 19 bp, Mus musculus
  siRNA target sequence for Prkwnk1 (NM_198703.1,3420-3438).
gacaacaaaacggcattat

SEQ ID NO: 814844 - DNA, 19 bp, Mus musculus
  siRNA target sequence for Prkwnk1 (NM_198703.1,3425-3443).
caaaacggcattatagaaa

SEQ ID NO: 814845 - DNA, 19 bp, Mus musculus
  siRNA target sequence for Prkwnk1 (NM_198703.1,3455-3473).
gtcgctctcggcatgaaaa

SEQ ID NO: 814846 - DNA, 19 bp, Mus musculus
  siRNA target sequence for Prkwnk1 (NM_198703.1,3457-3475).
cgctctcggcatgaaaaga

SEQ ID NO: 814847 - DNA, 19 bp, Mus musculus
  siRNA target sequence for Prkwnk1 (NM_198703.1,3481-3499).
cgcccaaaactgaggattt

SEQ ID NO: 814848 - DNA, 19 bp, Mus musculus
  siRNA target sequence for Prkwnk1 (NM_198703.1,3482-3500).
gcccaaaactgaggatttt

SEQ ID NO: 814849 - DNA, 19 bp, Mus musculus
  siRNA target sequence for Prkwnk1 (NM_198703.1,3483-3501).
cccaaaactgaggatttta

SEQ ID NO: 814850 - DNA, 19 bp, Mus musculus
  siRNA target sequence for Prkwnk1 (NM_198703.1,3484-3502).
ccaaaactgaggattttaa

SEQ ID NO: 814851 - DNA, 19 bp, Mus musculus
  siRNA target sequence for Prkwnk1 (NM_198703.1,3517-3535).
ggagaccgagtagtagaat

SEQ ID NO: 814852 - DNA, 19 bp, Mus musculus
  siRNA target sequence for Prkwnk1 (NM_198703.1,3522-3540).
ccgagtagtagaatgtcaa

SEQ ID NO: 814853 - DNA, 19 bp, Mus musculus
  siRNA target sequence for Prkwnk1 (NM_198703.1,3523-3541).
cgagtagtagaatgtcaat

SEQ ID NO: 814854 - DNA, 19 bp, Mus musculus
  siRNA target sequence for Prkwnk1 (NM_198703.1,3524-3542).
gagtagtagaatgtcaatt

SEQ ID NO: 814855 - DNA, 19 bp, Mus musculus
  siRNA target sequence for Prkwnk1 (NM_198703.1,3536-3554).
gtcaattagagactcataa

SEQ ID NO: 814856 - DNA, 19 bp, Mus musculus
  siRNA target sequence for Prkwnk1 (NM_198703.1,3556-3574).
cggaagatggttacattta

SEQ ID NO: 814857 - DNA, 19 bp, Mus musculus
  siRNA target sequence for Prkwnk1 (NM_198703.1,3614-3632).
caattatggtgaacaatga

SEQ ID NO: 814858 - DNA, 19 bp, Mus musculus
  siRNA target sequence for Prkwnk1 (NM_198703.1,3621-3639).
ggtgaacaatgactttatt

SEQ ID NO: 814859 - DNA, 19 bp, Mus musculus
  siRNA target sequence for Prkwnk1 (NM_198703.1,3666-3684).
ggctcaagtgcgggaaatt

SEQ ID NO: 814860 - DNA, 19 bp, Mus musculus
  siRNA target sequence for Prkwnk1 (NM_198703.1,3667-3685).
gctcaagtgcgggaaatta

SEQ ID NO: 814861 - DNA, 19 bp, Mus musculus
  siRNA target sequence for Prkwnk1 (NM_198703.1,3673-3691).
gtgcgggaaattattgaaa

SEQ ID NO: 814862 - DNA, 19 bp, Mus musculus
  siRNA target sequence for Prkwnk1 (NM_198703.1,3693-3711).
ggctgatgaaatgttaagt

SEQ ID NO: 814863 - DNA, 19 bp, Mus musculus
  siRNA target sequence for Prkwnk1 (NM_198703.1,3759-3777).
gcaaggaaaggatgactat

SEQ ID NO: 814864 - DNA, 19 bp, Mus musculus
  siRNA target sequence for Prkwnk1 (NM_198703.1,3810-3828).
gttcaagcaaccaattgct

SEQ ID NO: 814865 - DNA, 19 bp, Mus musculus
  siRNA target sequence for Prkwnk1 (NM_198703.1,3854-3872).
gtgttcctaccagttcttt

SEQ ID NO: 814866 - DNA, 19 bp, Mus musculus
  siRNA target sequence for Prkwnk1 (NM_198703.1,3856-3874).
gttcctaccagttctttaa

SEQ ID NO: 814867 - DNA, 19 bp, Mus musculus
  siRNA target sequence for Prkwnk1 (NM_198703.1,3866-3884).
gttctttaacgcaagttgt

SEQ ID NO: 814868 - DNA, 19 bp, Mus musculus
  siRNA target sequence for Prkwnk1 (NM_198703.1,3890-3908).
ctgctggaagacggtttat

SEQ ID NO: 814869 - DNA, 19 bp, Mus musculus
  siRNA target sequence for Prkwnk1 (NM_198703.1,3893-3911).
ctggaagacggtttatagt

SEQ ID NO: 814870 - DNA, 19 bp, Mus musculus
  siRNA target sequence for Prkwnk1 (NM_198703.1,3895-3913).
ggaagacggtttatagtga

SEQ ID NO: 814871 - DNA, 19 bp, Mus musculus
  siRNA target sequence for Prkwnk1 (NM_198703.1,3929-3947).
gtaggttacgagaatcaaa

SEQ ID NO: 814872 - DNA, 19 bp, Mus musculus
  siRNA target sequence for Prkwnk1 (NM_198703.1,3949-3967).
gttttcaccagtgacatat

SEQ ID NO: 814873 - DNA, 19 bp, Mus musculus
  siRNA target sequence for Prkwnk1 (NM_198703.1,3954-3972).
caccagtgacatatcagat

SEQ ID NO: 814874 - DNA, 19 bp, Mus musculus
  siRNA target sequence for Prkwnk1 (NM_198703.1,3996-4014).
ggcccctggaatgaactta

SEQ ID NO: 814875 - DNA, 19 bp, Mus musculus
  siRNA target sequence for Prkwnk1 (NM_198703.1,3997-4015).
gcccctggaatgaacttat

SEQ ID NO: 814876 - DNA, 19 bp, Mus musculus
  siRNA target sequence for Prkwnk1 (NM_198703.1,3999-4017).
ccctggaatgaacttatct

SEQ ID NO: 814877 - DNA, 19 bp, Mus musculus
  siRNA target sequence for Prkwnk1 (NM_198703.1,4001-4019).
ctggaatgaacttatctca

SEQ ID NO: 814878 - DNA, 19 bp, Mus musculus
  siRNA target sequence for Prkwnk1 (NM_198703.1,4089-4107).
caatacagcacctccaaat

SEQ ID NO: 814879 - DNA, 19 bp, Mus musculus
  siRNA target sequence for Prkwnk1 (NM_198703.1,4099-4117).
cctccaaattttaatcaca

SEQ ID NO: 814880 - DNA, 19 bp, Mus musculus
  siRNA target sequence for Prkwnk1 (NM_198703.1,4116-4134).
catggcgggaccaacattt

SEQ ID NO: 814881 - DNA, 19 bp, Mus musculus
  siRNA target sequence for Prkwnk1 (NM_198703.1,4177-4195).
gcatccacaccgtcagtat

SEQ ID NO: 814882 - DNA, 19 bp, Mus musculus
  siRNA target sequence for Prkwnk1 (NM_198703.1,4181-4199).
ccacaccgtcagtatcagt

SEQ ID NO: 814883 - DNA, 19 bp, Mus musculus
  siRNA target sequence for Prkwnk1 (NM_198703.1,4192-4210).
gtatcagtccctataacaa

SEQ ID NO: 814884 - DNA, 19 bp, Mus musculus
  siRNA target sequence for Prkwnk1 (NM_198703.1,4211-4229).
gcagtcctcttaatgacat

SEQ ID NO: 814885 - DNA, 19 bp, Mus musculus
  siRNA target sequence for Prkwnk1 (NM_198703.1,4321-4339).
ggtggtctcaccacaatgt

SEQ ID NO: 814886 - DNA, 19 bp, Mus musculus
  siRNA target sequence for Prkwnk1 (NM_198703.1,4365-4383).
cagtgcggtttcaagttct

SEQ ID NO: 814887 - DNA, 19 bp, Mus musculus
  siRNA target sequence for Prkwnk1 (NM_198703.1,4444-4462).
gggagcattgcttcaagta

SEQ ID NO: 814888 - DNA, 19 bp, Mus musculus
  siRNA target sequence for Prkwnk1 (NM_198703.1,4477-4495).
cctggaacattttctacaa

SEQ ID NO: 814889 - DNA, 19 bp, Mus musculus
  siRNA target sequence for Prkwnk1 (NM_198703.1,4541-4559).
ctccaactgtattattgca

SEQ ID NO: 814890 - DNA, 19 bp, Mus musculus
  siRNA target sequence for Prkwnk1 (NM_198703.1,4676-4694).
ctactctagctgaaacaat

SEQ ID NO: 814891 - DNA, 19 bp, Mus musculus
  siRNA target sequence for Prkwnk1 (NM_198703.1,4703-4721).
gtgcacactcactagacaa

SEQ ID NO: 814892 - DNA, 19 bp, Mus musculus
  siRNA target sequence for Prkwnk1 (NM_198703.1,4882-4900).
ccagtagtacctacttcta

SEQ ID NO: 814893 - DNA, 19 bp, Mus musculus
  siRNA target sequence for Prkwnk1 (NM_198703.1,4891-4909).
cctacttctacacctttat

SEQ ID NO: 814894 - DNA, 19 bp, Mus musculus
  siRNA target sequence for Prkwnk1 (NM_198703.1,4935-4953).
cttggtacaacctgttgtt

SEQ ID NO: 814895 - DNA, 19 bp, Mus musculus
  siRNA target sequence for Prkwnk1 (NM_198703.1,4938-4956).
ggtacaacctgttgttaat

SEQ ID NO: 814896 - DNA, 19 bp, Mus musculus
  siRNA target sequence for Prkwnk1 (NM_198703.1,5065-5083).
gctcctgggattgatgata

SEQ ID NO: 814897 - DNA, 19 bp, Mus musculus
  siRNA target sequence for Prkwnk1 (NM_198703.1,5066-5084).
ctcctgggattgatgatat

SEQ ID NO: 814898 - DNA, 19 bp, Mus musculus
  siRNA target sequence for Prkwnk1 (NM_198703.1,5068-5086).
cctgggattgatgatataa

SEQ ID NO: 814899 - DNA, 19 bp, Mus musculus
  siRNA target sequence for Prkwnk1 (NM_198703.1,5071-5089).
gggattgatgatataaaga

SEQ ID NO: 814900 - DNA, 19 bp, Mus musculus
  siRNA target sequence for Prkwnk1 (NM_198703.1,5106-5124).
gagatctctctttagtgaa

SEQ ID NO: 814901 - DNA, 19 bp, Mus musculus
  siRNA target sequence for Prkwnk1 (NM_198703.1,5157-5175).
ctccctagagacaccttta

SEQ ID NO: 814902 - DNA, 19 bp, Mus musculus
  siRNA target sequence for Prkwnk1 (NM_198703.1,5159-5177).
ccctagagacacctttagt

SEQ ID NO: 814903 - DNA, 19 bp, Mus musculus
  siRNA target sequence for Prkwnk1 (NM_198703.1,5160-5178).
cctagagacacctttagta

SEQ ID NO: 814904 - DNA, 19 bp, Mus musculus
  siRNA target sequence for Prkwnk1 (NM_198703.1,5191-5209).
gtcacaccgggcatcacta

SEQ ID NO: 814905 - DNA, 19 bp, Mus musculus
  siRNA target sequence for Prkwnk1 (NM_198703.1,5213-5231).
ctgctgtagcaccaagtaa

SEQ ID NO: 814906 - DNA, 19 bp, Mus musculus
  siRNA target sequence for Prkwnk1 (NM_198703.1,5216-5234).
ctgtagcaccaagtaaact

SEQ ID NO: 814907 - DNA, 19 bp, Mus musculus
  siRNA target sequence for Prkwnk1 (NM_198703.1,5218-5236).
gtagcaccaagtaaactca

SEQ ID NO: 814908 - DNA, 19 bp, Mus musculus
  siRNA target sequence for Prkwnk1 (NM_198703.1,5233-5251).
ctcatgacttccactacaa

SEQ ID NO: 814909 - DNA, 19 bp, Mus musculus
  siRNA target sequence for Prkwnk1 (NM_198703.1,5235-5253).
catgacttccactacaagt

SEQ ID NO: 814910 - DNA, 19 bp, Mus musculus
  siRNA target sequence for Prkwnk1 (NM_198703.1,5263-5281).
ccaccaaccagtttaccat

SEQ ID NO: 814911 - DNA, 19 bp, Mus musculus
  siRNA target sequence for Prkwnk1 (NM_198703.1,5264-5282).
caccaaccagtttaccatt

SEQ ID NO: 814912 - DNA, 19 bp, Mus musculus
  siRNA target sequence for Prkwnk1 (NM_198703.1,5396-5414).
ctcccccaaagccaactaa

SEQ ID NO: 814913 - DNA, 19 bp, Mus musculus
  siRNA target sequence for Prkwnk1 (NM_198703.1,5398-5416).
cccccaaagccaactaaga

SEQ ID NO: 814914 - DNA, 19 bp, Mus musculus
  siRNA target sequence for Prkwnk1 (NM_198703.1,5428-5446).
ccagtgggtactgaacttt

SEQ ID NO: 814915 - DNA, 19 bp, Mus musculus
  siRNA target sequence for Prkwnk1 (NM_198703.1,5488-5506).
ggaccttctctaattcagt

SEQ ID NO: 814916 - DNA, 19 bp, Mus musculus
  siRNA target sequence for Prkwnk1 (NM_198703.1,5505-5523).
gtcccagcaaccactagaa

SEQ ID NO: 814917 - DNA, 19 bp, Mus musculus
  siRNA target sequence for Prkwnk1 (NM_198703.1,5527-5545).
cttgatgctcagttgagaa

SEQ ID NO: 814918 - DNA, 19 bp, Mus musculus
  siRNA target sequence for Prkwnk1 (NM_198703.1,5549-5567).
cacttagtccagagactat

SEQ ID NO: 814919 - DNA, 19 bp, Mus musculus
  siRNA target sequence for Prkwnk1 (NM_198703.1,5555-5573).
gtccagagactattacagt

SEQ ID NO: 814920 - DNA, 19 bp, Mus musculus
  siRNA target sequence for Prkwnk1 (NM_198703.1,5581-5599).
gcagttggtcctttgtcta

SEQ ID NO: 814921 - DNA, 19 bp, Mus musculus
  siRNA target sequence for Prkwnk1 (NM_198703.1,5590-5608).
cctttgtctacgatgtctt

SEQ ID NO: 814922 - DNA, 19 bp, Mus musculus
  siRNA target sequence for Prkwnk1 (NM_198703.1,5630-5648).
ggactcggcttcaaaagga

SEQ ID NO: 814923 - DNA, 19 bp, Mus musculus
  siRNA target sequence for Prkwnk1 (NM_198703.1,5631-5649).
gactcggcttcaaaaggat

SEQ ID NO: 814924 - DNA, 19 bp, Mus musculus
  siRNA target sequence for Prkwnk1 (NM_198703.1,5662-5680).
catgtcacagcaactagtt

SEQ ID NO: 814925 - DNA, 19 bp, Mus musculus
  siRNA target sequence for Prkwnk1 (NM_198703.1,5706-5724).
gcgatttcaggtttcagtt

SEQ ID NO: 814926 - DNA, 19 bp, Mus musculus
  siRNA target sequence for Prkwnk1 (NM_198703.1,5707-5725).
cgatttcaggtttcagtta

SEQ ID NO: 814927 - DNA, 19 bp, Mus musculus
  siRNA target sequence for Prkwnk1 (NM_198703.1,5738-5756).
cccagaaagaacgtaaaaa

SEQ ID NO: 814928 - DNA, 19 bp, Mus musculus
  siRNA target sequence for Prkwnk1 (NM_198703.1,5796-5814).
cacatcagagtcatcagtt

SEQ ID NO: 814929 - DNA, 19 bp, Mus musculus
  siRNA target sequence for Prkwnk1 (NM_198703.1,5803-5821).
gagtcatcagttctttcaa

SEQ ID NO: 814930 - DNA, 19 bp, Mus musculus
  siRNA target sequence for Prkwnk1 (NM_198703.1,5850-5868).
gccagagcctaatggaatt

SEQ ID NO: 814931 - DNA, 19 bp, Mus musculus
  siRNA target sequence for Prkwnk1 (NM_198703.1,5851-5869).
ccagagcctaatggaatta

SEQ ID NO: 814932 - DNA, 19 bp, Mus musculus
  siRNA target sequence for Prkwnk1 (NM_198703.1,5854-5872).
gagcctaatggaattagta

SEQ ID NO: 814933 - DNA, 19 bp, Mus musculus
  siRNA target sequence for Prkwnk1 (NM_198703.1,5856-5874).
gcctaatggaattagtatt

SEQ ID NO: 814934 - DNA, 19 bp, Mus musculus
  siRNA target sequence for Prkwnk1 (NM_198703.1,5876-5894).
ctggcatctccttagatgt

SEQ ID NO: 814935 - DNA, 19 bp, Mus musculus
  siRNA target sequence for Prkwnk1 (NM_198703.1,5915-5933).
cacctaccccagaagcaaa

SEQ ID NO: 814936 - DNA, 19 bp, Mus musculus
  siRNA target sequence for Prkwnk1 (NM_198703.1,5965-5983).
cgttttcaggtgacaacta

SEQ ID NO: 814937 - DNA, 19 bp, Mus musculus
  siRNA target sequence for Prkwnk1 (NM_198703.1,5991-6009).
caaagtgggtcgtttctct

SEQ ID NO: 814938 - DNA, 19 bp, Mus musculus
  siRNA target sequence for Prkwnk1 (NM_198703.1,5995-6013).
gtgggtcgtttctctgttt

SEQ ID NO: 814939 - DNA, 19 bp, Mus musculus
  siRNA target sequence for Prkwnk1 (NM_198703.1,5997-6015).
gggtcgtttctctgtttca

SEQ ID NO: 814940 - DNA, 19 bp, Mus musculus
  siRNA target sequence for Prkwnk1 (NM_198703.1,5998-6016).
ggtcgtttctctgtttcaa

SEQ ID NO: 814941 - DNA, 19 bp, Mus musculus
  siRNA target sequence for Prkwnk1 (NM_198703.1,6101-6119).
ctgctgtgataccaaagaa

SEQ ID NO: 814942 - DNA, 19 bp, Mus musculus
  siRNA target sequence for Prkwnk1 (NM_198703.1,6174-6192).
ggaggctgcctttctaagt

SEQ ID NO: 814943 - DNA, 19 bp, Mus musculus
  siRNA target sequence for Prkwnk1 (NM_198703.1,6253-6271).
cttcccgtccagaatctaa

SEQ ID NO: 814944 - DNA, 19 bp, Mus musculus
  siRNA target sequence for Prkwnk1 (NM_198703.1,6257-6275).
ccgtccagaatctaagtca

SEQ ID NO: 814945 - DNA, 19 bp, Mus musculus
  siRNA target sequence for Prkwnk1 (NM_198703.1,6258-6276).
cgtccagaatctaagtcaa

SEQ ID NO: 814946 - DNA, 19 bp, Mus musculus
  siRNA target sequence for Prkwnk1 (NM_198703.1,6268-6286).
ctaagtcaaagccttagta

SEQ ID NO: 814947 - DNA, 19 bp, Mus musculus
  siRNA target sequence for Prkwnk1 (NM_198703.1,6334-6352).
gaagatgaagacttaaggt

SEQ ID NO: 814948 - DNA, 19 bp, Mus musculus
  siRNA target sequence for Prkwnk1 (NM_198703.1,6362-6380).
gacgactacgagaaaaaca

SEQ ID NO: 814949 - DNA, 19 bp, Mus musculus
  siRNA target sequence for Prkwnk1 (NM_198703.1,6421-6439).
gaaattgaatctttgtata

SEQ ID NO: 814950 - DNA, 19 bp, Mus musculus
  siRNA target sequence for Prkwnk1 (NM_198703.1,6545-6563).
gcagctcattgggcaataa

SEQ ID NO: 814951 - DNA, 19 bp, Mus musculus
  siRNA target sequence for Prkwnk1 (NM_198703.1,6546-6564).
cagctcattgggcaataaa

SEQ ID NO: 814952 - DNA, 19 bp, Mus musculus
  siRNA target sequence for Prkwnk1 (NM_198703.1,6597-6615).
gagtggaacttcagtctta

SEQ ID NO: 814953 - DNA, 19 bp, Mus musculus
  siRNA target sequence for Prkwnk1 (NM_198703.1,6599-6617).
gtggaacttcagtcttaca

SEQ ID NO: 814954 - DNA, 19 bp, Mus musculus
  siRNA target sequence for Prkwnk1 (NM_198703.1,6662-6680).
ggcacaaccagctgttaca

SEQ ID NO: 814955 - DNA, 19 bp, Mus musculus
  siRNA target sequence for Prkwnk1 (NM_198703.1,6775-6793).
gggaccagcagcacaaata

SEQ ID NO: 814956 - DNA, 19 bp, Mus musculus
  siRNA target sequence for Prkwnk1 (NM_198703.1,7069-7087).
ctaggtcacttcaccaaat

SEQ ID NO: 814957 - DNA, 19 bp, Mus musculus
  siRNA target sequence for Prkwnk1 (NM_198703.1,7096-7114).
cccccacagcagtatggtt

SEQ ID NO: 814958 - DNA, 19 bp, Mus musculus
  siRNA target sequence for Prkwnk1 (NM_198703.1,7097-7115).
ccccacagcagtatggttt

SEQ ID NO: 814959 - DNA, 19 bp, Mus musculus
  siRNA target sequence for Prkwnk1 (NM_198703.1,7199-7217).
cagcatccttgcaaaattt

SEQ ID NO: 814960 - DNA, 19 bp, Mus musculus
  siRNA target sequence for Prkwnk1 (NM_198703.1,7201-7219).
gcatccttgcaaaatttca

SEQ ID NO: 814961 - DNA, 19 bp, Mus musculus
  siRNA target sequence for Prkwnk1 (NM_198703.1,7251-7269).
ccccccaggttccaatcta

SEQ ID NO: 814962 - DNA, 19 bp, Mus musculus
  siRNA target sequence for Col25a1 (NM_198711.1,2497-2515).
ggttacaccgtggcttatt

SEQ ID NO: 814963 - DNA, 19 bp, Mus musculus
  siRNA target sequence for Col25a1 (NM_198711.1,2505-2523).
cgtggcttattgccaaaaa

SEQ ID NO: 814964 - DNA, 19 bp, Mus musculus
  siRNA target sequence for Ctf2 (NM_198858.1,266-284).
gcagctgtctccttcaaga

SEQ ID NO: 814965 - DNA, 19 bp, Mus musculus
  siRNA target sequence for Ctf2 (NM_198858.1,367-385).
gggggacgaccagagttat

SEQ ID NO: 814966 - DNA, 19 bp, Mus musculus
  siRNA target sequence for Ctf2 (NM_198858.1,369-387).
gggacgaccagagttatct

SEQ ID NO: 814967 - DNA, 19 bp, Mus musculus
  siRNA target sequence for Ctf2 (NM_198858.1,371-389).
gacgaccagagttatctga

SEQ ID NO: 814968 - DNA, 19 bp, Mus musculus
  siRNA target sequence for Ctf2 (NM_198858.1,568-586).
catagtgacccgagaatat

SEQ ID NO: 814969 - DNA, 19 bp, Mus musculus
  siRNA target sequence for AI646023 (NM_198860.1,518-536).
ggaagtcctcggacaagat

SEQ ID NO: 814970 - DNA, 19 bp, Mus musculus
  siRNA target sequence for AI646023 (NM_198860.1,566-584).
cgcactccaagcgaaaaca

SEQ ID NO: 814971 - DNA, 19 bp, Mus musculus
  siRNA target sequence for AI646023 (NM_198860.1,640-658).
ggggagactgtggatcttt

SEQ ID NO: 814972 - DNA, 19 bp, Mus musculus
  siRNA target sequence for AI646023 (NM_198860.1,681-699).
ggatgtgcagcacatatca

SEQ ID NO: 814973 - DNA, 19 bp, Mus musculus
  siRNA target sequence for AI646023 (NM_198860.1,996-1014).
ctcgctccccactatctat

SEQ ID NO: 814974 - DNA, 19 bp, Mus musculus
  siRNA target sequence for AI646023 (NM_198860.1,998-1016).
cgctccccactatctatga

SEQ ID NO: 814975 - DNA, 19 bp, Mus musculus
  siRNA target sequence for LOC192976 (NM_198861.1,642-660).
ggaatcctccagacaacat

SEQ ID NO: 814976 - DNA, 19 bp, Mus musculus
  siRNA target sequence for LOC192976 (NM_198861.1,674-692).
ggcattccactgacttcaa

SEQ ID NO: 814977 - DNA, 19 bp, Mus musculus
  siRNA target sequence for LOC192976 (NM_198861.1,890-908).
ctgaaggaccccagcaaat

SEQ ID NO: 814978 - DNA, 19 bp, Mus musculus
  siRNA target sequence for LOC192976 (NM_198861.1,910-928).
ccccaatgtcacatggatt

SEQ ID NO: 814979 - DNA, 19 bp, Mus musculus
  siRNA target sequence for LOC192976 (NM_198861.1,985-1003).
ccggaagcgctctccaaaa

SEQ ID NO: 814980 - DNA, 19 bp, Mus musculus
  siRNA target sequence for LOC192976 (NM_198861.1,987-1005).
ggaagcgctctccaaaaca

SEQ ID NO: 814981 - DNA, 19 bp, Mus musculus
  siRNA target sequence for Nlgn2 (NM_198862.1,636-654).
gtgtggagcaagttcaaca

SEQ ID NO: 814982 - DNA, 19 bp, Mus musculus
  siRNA target sequence for Nlgn2 (NM_198862.1,691-709).
cacgcgtgcgcgacaacta

SEQ ID NO: 814983 - DNA, 19 bp, Mus musculus
  siRNA target sequence for Slitrk3 (NM_198864.1,11-29).
caagcatagctgaaatgct

SEQ ID NO: 814984 - DNA, 19 bp, Mus musculus
  siRNA target sequence for Slitrk3 (NM_198864.1,142-160).
ccatgctactgcgaagtta

SEQ ID NO: 814985 - DNA, 19 bp, Mus musculus
  siRNA target sequence for Slitrk3 (NM_198864.1,143-161).
catgctactgcgaagttaa

SEQ ID NO: 814986 - DNA, 19 bp, Mus musculus
  siRNA target sequence for Slitrk3 (NM_198864.1,146-164).
gctactgcgaagttaaaga

SEQ ID NO: 814987 - DNA, 19 bp, Mus musculus
  siRNA target sequence for Slitrk3 (NM_198864.1,147-165).
ctactgcgaagttaaagaa

SEQ ID NO: 814988 - DNA, 19 bp, Mus musculus
  siRNA target sequence for Slitrk3 (NM_198864.1,225-243).
gttctggtcaagacctttt

SEQ ID NO: 814989 - DNA, 19 bp, Mus musculus
  siRNA target sequence for Slitrk3 (NM_198864.1,236-254).
gaccttttaaactgtatct

SEQ ID NO: 814990 - DNA, 19 bp, Mus musculus
  siRNA target sequence for Slitrk3 (NM_198864.1,247-265).
ctgtatcttcagaggaatt

SEQ ID NO: 814991 - DNA, 19 bp, Mus musculus
  siRNA target sequence for Slitrk3 (NM_198864.1,318-336).
cattaaccttgggaacaat

SEQ ID NO: 814992 - DNA, 19 bp, Mus musculus
  siRNA target sequence for Slitrk3 (NM_198864.1,348-366).
cattcaaactggagcattt

SEQ ID NO: 814993 - DNA, 19 bp, Mus musculus
  siRNA target sequence for Slitrk3 (NM_198864.1,378-396).
gattttaaagagactgtat

SEQ ID NO: 814994 - DNA, 19 bp, Mus musculus
  siRNA target sequence for Slitrk3 (NM_198864.1,393-411).
gtatctccatgagaacaaa

SEQ ID NO: 814995 - DNA, 19 bp, Mus musculus
  siRNA target sequence for Slitrk3 (NM_198864.1,399-417).
ccatgagaacaaactagat

SEQ ID NO: 814996 - DNA, 19 bp, Mus musculus
  siRNA target sequence for Slitrk3 (NM_198864.1,444-462).
cttagaaagtctggaatat

SEQ ID NO: 814997 - DNA, 19 bp, Mus musculus
  siRNA target sequence for Slitrk3 (NM_198864.1,466-484).
caggcagattacaatgtca

SEQ ID NO: 814998 - DNA, 19 bp, Mus musculus
  siRNA target sequence for Slitrk3 (NM_198864.1,468-486).
ggcagattacaatgtcatt

SEQ ID NO: 814999 - DNA, 19 bp, Mus musculus
  siRNA target sequence for Slitrk3 (NM_198864.1,469-487).
gcagattacaatgtcatta

SEQ ID NO: 815000 - DNA, 19 bp, Mus musculus
  siRNA target sequence for Slitrk3 (NM_198864.1,481-499).
gtcattaaacgtatagaga

SEQ ID NO: 815001 - DNA, 19 bp, Mus musculus
  siRNA target sequence for Slitrk3 (NM_198864.1,502-520).
ggggcatttcggaacctaa

SEQ ID NO: 815002 - DNA, 19 bp, Mus musculus
  siRNA target sequence for Slitrk3 (NM_198864.1,511-529).
cggaacctaagtaaattga

SEQ ID NO: 815003 - DNA, 19 bp, Mus musculus
  siRNA target sequence for Slitrk3 (NM_198864.1,521-539).
gtaaattgagggttctaat

SEQ ID NO: 815004 - DNA, 19 bp, Mus musculus
  siRNA target sequence for Slitrk3 (NM_198864.1,528-546).
gagggttctaatcttaaat

SEQ ID NO: 815005 - DNA, 19 bp, Mus musculus
  siRNA target sequence for Slitrk3 (NM_198864.1,530-548).
gggttctaatcttaaatga

SEQ ID NO: 815006 - DNA, 19 bp, Mus musculus
  siRNA target sequence for Slitrk3 (NM_198864.1,531-549).
ggttctaatcttaaatgat

SEQ ID NO: 815007 - DNA, 19 bp, Mus musculus
  siRNA target sequence for Slitrk3 (NM_198864.1,532-550).
gttctaatcttaaatgata

SEQ ID NO: 815008 - DNA, 19 bp, Mus musculus
  siRNA target sequence for Slitrk3 (NM_198864.1,558-576).
ccccgtgcttccaaccaat

SEQ ID NO: 815009 - DNA, 19 bp, Mus musculus
  siRNA target sequence for Slitrk3 (NM_198864.1,560-578).
ccgtgcttccaaccaattt

SEQ ID NO: 815010 - DNA, 19 bp, Mus musculus
  siRNA target sequence for Slitrk3 (NM_198864.1,561-579).
cgtgcttccaaccaattta

SEQ ID NO: 815011 - DNA, 19 bp, Mus musculus
  siRNA target sequence for Slitrk3 (NM_198864.1,564-582).
gcttccaaccaatttattt

SEQ ID NO: 815012 - DNA, 19 bp, Mus musculus
  siRNA target sequence for Slitrk3 (NM_198864.1,705-723).
gaactgtacctgtgagata

SEQ ID NO: 815013 - DNA, 19 bp, Mus musculus
  siRNA target sequence for Slitrk3 (NM_198864.1,710-728).
gtacctgtgagatagtaca

SEQ ID NO: 815014 - DNA, 19 bp, Mus musculus
  siRNA target sequence for Slitrk3 (NM_198864.1,744-762).
ggagcgaataccttacaca

SEQ ID NO: 815015 - DNA, 19 bp, Mus musculus
  siRNA target sequence for Slitrk3 (NM_198864.1,785-803).
gtgagacacctttccattt

SEQ ID NO: 815016 - DNA, 19 bp, Mus musculus
  siRNA target sequence for Slitrk3 (NM_198864.1,817-835).
ctccgtgaaatcaagaaga

SEQ ID NO: 815017 - DNA, 19 bp, Mus musculus
  siRNA target sequence for Slitrk3 (NM_198864.1,882-900).
ggggattccccacttatct

SEQ ID NO: 815018 - DNA, 19 bp, Mus musculus
  siRNA target sequence for Slitrk3 (NM_198864.1,883-901).
gggattccccacttatctt

SEQ ID NO: 815019 - DNA, 19 bp, Mus musculus
  siRNA target sequence for Slitrk3 (NM_198864.1,885-903).
gattccccacttatcttca

SEQ ID NO: 815020 - DNA, 19 bp, Mus musculus
  siRNA target sequence for Slitrk3 (NM_198864.1,916-934).
gcctggccaactaaacctt

SEQ ID NO: 815021 - DNA, 19 bp, Mus musculus
  siRNA target sequence for Slitrk3 (NM_198864.1,954-972).
ccattttactgcttcatct

SEQ ID NO: 815022 - DNA, 19 bp, Mus musculus
  siRNA target sequence for Slitrk3 (NM_198864.1,976-994).
gaatataagtcctctaata

SEQ ID NO: 815023 - DNA, 19 bp, Mus musculus
  siRNA target sequence for Slitrk3 (NM_198864.1,986-1004).
cctctaataagcaaccaaa

SEQ ID NO: 815024 - DNA, 19 bp, Mus musculus
  siRNA target sequence for Slitrk3 (NM_198864.1,1040-1058).
cgacatcccaggctttata

SEQ ID NO: 815025 - DNA, 19 bp, Mus musculus
  siRNA target sequence for Slitrk3 (NM_198864.1,1041-1059).
gacatcccaggctttatat

SEQ ID NO: 815026 - DNA, 19 bp, Mus musculus
  siRNA target sequence for Slitrk3 (NM_198864.1,1078-1096).
cctattgccccctatcaga

SEQ ID NO: 815027 - DNA, 19 bp, Mus musculus
  siRNA target sequence for Slitrk3 (NM_198864.1,1100-1118).
gaccacccattcccattat

SEQ ID NO: 815028 - DNA, 19 bp, Mus musculus
  siRNA target sequence for Slitrk3 (NM_198864.1,1127-1145).
ctgggtgtacatgcaattt

SEQ ID NO: 815029 - DNA, 19 bp, Mus musculus
  siRNA target sequence for Slitrk3 (NM_198864.1,1130-1148).
ggtgtacatgcaatttgca

SEQ ID NO: 815030 - DNA, 19 bp, Mus musculus
  siRNA target sequence for Slitrk3 (NM_198864.1,1131-1149).
gtgtacatgcaatttgcat

SEQ ID NO: 815031 - DNA, 19 bp, Mus musculus
  siRNA target sequence for Slitrk3 (NM_198864.1,1245-1263).
cctgagcagcaatcttatt

SEQ ID NO: 815032 - DNA, 19 bp, Mus musculus
  siRNA target sequence for Slitrk3 (NM_198864.1,1269-1287).
gatataccgctctgatttt

SEQ ID NO: 815033 - DNA, 19 bp, Mus musculus
  siRNA target sequence for Slitrk3 (NM_198864.1,1371-1389).
caacctgaagagtctcttt

SEQ ID NO: 815034 - DNA, 19 bp, Mus musculus
  siRNA target sequence for Slitrk3 (NM_198864.1,1377-1395).
gaagagtctctttctcaat

SEQ ID NO: 815035 - DNA, 19 bp, Mus musculus
  siRNA target sequence for Slitrk3 (NM_198864.1,1438-1456).
ctgcagagcttgcattact

SEQ ID NO: 815036 - DNA, 19 bp, Mus musculus
  siRNA target sequence for Slitrk3 (NM_198864.1,1441-1459).
cagagcttgcattacttgt

SEQ ID NO: 815037 - DNA, 19 bp, Mus musculus
  siRNA target sequence for Slitrk3 (NM_198864.1,1450-1468).
cattacttgtacttcgaat

SEQ ID NO: 815038 - DNA, 19 bp, Mus musculus
  siRNA target sequence for Slitrk3 (NM_198864.1,1473-1491).
cgtcatccgggaaatccaa

SEQ ID NO: 815039 - DNA, 19 bp, Mus musculus
  siRNA target sequence for Slitrk3 (NM_198864.1,1514-1532).
ccaacttgaagctgctatt

SEQ ID NO: 815040 - DNA, 19 bp, Mus musculus
  siRNA target sequence for Slitrk3 (NM_198864.1,1515-1533).
caacttgaagctgctattt

SEQ ID NO: 815041 - DNA, 19 bp, Mus musculus
  siRNA target sequence for Slitrk3 (NM_198864.1,1524-1542).
gctgctatttctcaacaat

SEQ ID NO: 815042 - DNA, 19 bp, Mus musculus
  siRNA target sequence for Slitrk3 (NM_198864.1,1528-1546).
ctatttctcaacaataact

SEQ ID NO: 815043 - DNA, 19 bp, Mus musculus
  siRNA target sequence for Slitrk3 (NM_198864.1,1675-1693).
gatctcaacgagaatcctt

SEQ ID NO: 815044 - DNA, 19 bp, Mus musculus
  siRNA target sequence for Slitrk3 (NM_198864.1,1706-1724).
gcgacttagtcccctttaa

SEQ ID NO: 815045 - DNA, 19 bp, Mus musculus
  siRNA target sequence for Slitrk3 (NM_198864.1,1752-1770).
cagcgtggtaggtgatgta

SEQ ID NO: 815046 - DNA, 19 bp, Mus musculus
  siRNA target sequence for Slitrk3 (NM_198864.1,1754-1772).
gcgtggtaggtgatgtact

SEQ ID NO: 815047 - DNA, 19 bp, Mus musculus
  siRNA target sequence for Slitrk3 (NM_198864.1,1800-1818).
ccgtgatgtgcgcactatt

SEQ ID NO: 815048 - DNA, 19 bp, Mus musculus
  siRNA target sequence for Slitrk3 (NM_198864.1,1802-1820).
gtgatgtgcgcactattga

SEQ ID NO: 815049 - DNA, 19 bp, Mus musculus
  siRNA target sequence for Slitrk3 (NM_198864.1,1916-1934).
gtgcatcaccttatgagtt

SEQ ID NO: 815050 - DNA, 19 bp, Mus musculus
  siRNA target sequence for Slitrk3 (NM_198864.1,2102-2120).
gaatccagatgcaatgtca

SEQ ID NO: 815051 - DNA, 19 bp, Mus musculus
  siRNA target sequence for Slitrk3 (NM_198864.1,2212-2230).
ggtcacgtgtacgagtata

SEQ ID NO: 815052 - DNA, 19 bp, Mus musculus
  siRNA target sequence for Slitrk3 (NM_198864.1,2213-2231).
gtcacgtgtacgagtatat

SEQ ID NO: 815053 - DNA, 19 bp, Mus musculus
  siRNA target sequence for Slitrk3 (NM_198864.1,2253-2271).
gtgtaacaaccccatctat

SEQ ID NO: 815054 - DNA, 19 bp, Mus musculus
  siRNA target sequence for Slitrk3 (NM_198864.1,2255-2273).
gtaacaaccccatctataa

SEQ ID NO: 815055 - DNA, 19 bp, Mus musculus
  siRNA target sequence for Slitrk3 (NM_198864.1,2429-2447).
ggaccttgctggaaaaaga

SEQ ID NO: 815056 - DNA, 19 bp, Mus musculus
  siRNA target sequence for Slitrk3 (NM_198864.1,2479-2497).
caacttaacaccatagtga

SEQ ID NO: 815057 - DNA, 19 bp, Mus musculus
  siRNA target sequence for Slitrk3 (NM_198864.1,2589-2607).
ccgccaccatgagaagaat

SEQ ID NO: 815058 - DNA, 19 bp, Mus musculus
  siRNA target sequence for Slitrk3 (NM_198864.1,2690-2708).
cgtgcacagtgggatttgt

SEQ ID NO: 815059 - DNA, 19 bp, Mus musculus
  siRNA target sequence for Slitrk3 (NM_198864.1,2757-2775).
cccccctggcatgcaatat

SEQ ID NO: 815060 - DNA, 19 bp, Mus musculus
  siRNA target sequence for Slitrk3 (NM_198864.1,2848-2866).
caaacccccaaaagtgatt

SEQ ID NO: 815061 - DNA, 19 bp, Mus musculus
  siRNA target sequence for Slitrk3 (NM_198864.1,2871-2889).
cgacttaagggccaaactt

SEQ ID NO: 815062 - DNA, 19 bp, Mus musculus
  siRNA target sequence for Slitrk3 (NM_198864.1,2874-2892).
cttaagggccaaacttcaa

SEQ ID NO: 815063 - DNA, 19 bp, Mus musculus
  siRNA target sequence for Slitrk3 (NM_198864.1,2879-2897).
gggccaaacttcaaactaa

SEQ ID NO: 815064 - DNA, 19 bp, Mus musculus
  siRNA target sequence for B4GalNAcT3 (NM_198884.1,79-97).
ctgctgctcgccgtagtat

SEQ ID NO: 815065 - DNA, 19 bp, Mus musculus
  siRNA target sequence for B4GalNAcT3 (NM_198884.1,102-120).
gggactctggactctgtat

SEQ ID NO: 815066 - DNA, 19 bp, Mus musculus
  siRNA target sequence for B4GalNAcT3 (NM_198884.1,229-247).
gatccgaatctccaattct

SEQ ID NO: 815067 - DNA, 19 bp, Mus musculus
  siRNA target sequence for B4GalNAcT3 (NM_198884.1,359-377).
gccacgccaacctacatgt

SEQ ID NO: 815068 - DNA, 19 bp, Mus musculus
  siRNA target sequence for B4GalNAcT3 (NM_198884.1,363-381).
cgccaacctacatgtgttt

SEQ ID NO: 815069 - DNA, 19 bp, Mus musculus
  siRNA target sequence for B4GalNAcT3 (NM_198884.1,365-383).
ccaacctacatgtgtttga

SEQ ID NO: 815070 - DNA, 19 bp, Mus musculus
  siRNA target sequence for B4GalNAcT3 (NM_198884.1,555-573).
catcgctgctgatgacaat

SEQ ID NO: 815071 - DNA, 19 bp, Mus musculus
  siRNA target sequence for B4GalNAcT3 (NM_198884.1,665-683).
gagagtttgggaaatttca

SEQ ID NO: 815072 - DNA, 19 bp, Mus musculus
  siRNA target sequence for B4GalNAcT3 (NM_198884.1,667-685).
gagtttgggaaatttcaga

SEQ ID NO: 815073 - DNA, 19 bp, Mus musculus
  siRNA target sequence for B4GalNAcT3 (NM_198884.1,741-759).
cctgcacaagcaaaatgat

SEQ ID NO: 815074 - DNA, 19 bp, Mus musculus
  siRNA target sequence for B4GalNAcT3 (NM_198884.1,1035-1053).
gcccgattgtccctacaaa

SEQ ID NO: 815075 - DNA, 19 bp, Mus musculus
  siRNA target sequence for B4GalNAcT3 (NM_198884.1,1092-1110).
ccagggcctccgttttgtt

SEQ ID NO: 815076 - DNA, 19 bp, Mus musculus
  siRNA target sequence for B4GalNAcT3 (NM_198884.1,1123-1141).
gtttatcccaatgactata

SEQ ID NO: 815077 - DNA, 19 bp, Mus musculus
  siRNA target sequence for B4GalNAcT3 (NM_198884.1,1153-1171).
cacatggagacccataata

SEQ ID NO: 815078 - DNA, 19 bp, Mus musculus
  siRNA target sequence for B4GalNAcT3 (NM_198884.1,1158-1176).
ggagacccataataaatgt

SEQ ID NO: 815079 - DNA, 19 bp, Mus musculus
  siRNA target sequence for B4GalNAcT3 (NM_198884.1,1208-1226).
ggtccagcttccaggaata

SEQ ID NO: 815080 - DNA, 19 bp, Mus musculus
  siRNA target sequence for B4GalNAcT3 (NM_198884.1,1209-1227).
gtccagcttccaggaatat

SEQ ID NO: 815081 - DNA, 19 bp, Mus musculus
  siRNA target sequence for B4GalNAcT3 (NM_198884.1,1335-1353).
ctctcaagaccagaatact

SEQ ID NO: 815082 - DNA, 19 bp, Mus musculus
  siRNA target sequence for B4GalNAcT3 (NM_198884.1,1451-1469).
ctgtagcgcctctttccaa

SEQ ID NO: 815083 - DNA, 19 bp, Mus musculus
  siRNA target sequence for B4GalNAcT3 (NM_198884.1,1542-1560).
gcccagccgagatttgtct

SEQ ID NO: 815084 - DNA, 19 bp, Mus musculus
  siRNA target sequence for B4GalNAcT3 (NM_198884.1,1821-1839).
gagtgaggtgttcgaatat

SEQ ID NO: 815085 - DNA, 19 bp, Mus musculus
  siRNA target sequence for B4GalNAcT3 (NM_198884.1,1823-1841).
gtgaggtgttcgaatatgt

SEQ ID NO: 815086 - DNA, 19 bp, Mus musculus
  siRNA target sequence for B4GalNAcT3 (NM_198884.1,1833-1851).
cgaatatgtgcctatgttt

SEQ ID NO: 815087 - DNA, 19 bp, Mus musculus
  siRNA target sequence for B4GalNAcT3 (NM_198884.1,1926-1944).
cgacctgaactgtaacaca

SEQ ID NO: 815088 - DNA, 19 bp, Mus musculus
  siRNA target sequence for B4GalNAcT3 (NM_198884.1,1927-1945).
gacctgaactgtaacacat

SEQ ID NO: 815089 - DNA, 19 bp, Mus musculus
  siRNA target sequence for B4GalNAcT3 (NM_198884.1,1988-2006).
cacgggtcttcctgagaaa

SEQ ID NO: 815090 - DNA, 19 bp, Mus musculus
  siRNA target sequence for B4GalNAcT3 (NM_198884.1,2317-2335).
cgagctgtggtccacttta

SEQ ID NO: 815091 - DNA, 19 bp, Mus musculus
  siRNA target sequence for B4GalNAcT3 (NM_198884.1,2360-2378).
gctgggtgcagcagttcat

SEQ ID NO: 815092 - DNA, 19 bp, Mus musculus
  siRNA target sequence for B4GalNAcT3 (NM_198884.1,2416-2434).
gcacatttcagcatcatta

SEQ ID NO: 815093 - DNA, 19 bp, Mus musculus
  siRNA target sequence for B4GalNAcT3 (NM_198884.1,2617-2635).
ccagcaggaatcattgata

SEQ ID NO: 815094 - DNA, 19 bp, Mus musculus
  siRNA target sequence for B4GalNAcT3 (NM_198884.1,2749-2767).
ggactgctcgggatctaca

SEQ ID NO: 815095 - DNA, 19 bp, Mus musculus
  siRNA target sequence for B4GalNAcT3 (NM_198884.1,2750-2768).
gactgctcgggatctacaa

SEQ ID NO: 815096 - DNA, 19 bp, Mus musculus
  siRNA target sequence for B4GalNAcT3 (NM_198884.1,2933-2951).
ggaaccgtcgccaaatgaa

SEQ ID NO: 815097 - DNA, 19 bp, Mus musculus
  siRNA target sequence for BC020447 (NM_198886.2,343-361).
gtggccgacagcctcaaat

SEQ ID NO: 815098 - DNA, 19 bp, Mus musculus
  siRNA target sequence for BC020447 (NM_198886.2,596-614).
cccttagccagttcattga

SEQ ID NO: 815099 - DNA, 19 bp, Mus musculus
  siRNA target sequence for BC020447 (NM_198886.2,618-636).
caaaataggccttaaagaa

SEQ ID NO: 815100 - DNA, 19 bp, Mus musculus
  siRNA target sequence for BC020447 (NM_198886.2,1054-1072).
ggggaaggcctgttgttga

SEQ ID NO: 815101 - DNA, 19 bp, Mus musculus
  siRNA target sequence for BC020447 (NM_198886.2,1055-1073).
gggaaggcctgttgttgat

SEQ ID NO: 815102 - DNA, 19 bp, Mus musculus
  siRNA target sequence for BC020447 (NM_198886.2,1208-1226).
gtggaaaccccttaaagaa

SEQ ID NO: 815103 - DNA, 19 bp, Mus musculus
  siRNA target sequence for BC020447 (NM_198886.2,1238-1256).
ccaaatgccctgaagtgtt

SEQ ID NO: 815104 - DNA, 19 bp, Mus musculus
  siRNA target sequence for BC020447 (NM_198886.2,1288-1306).
cgtgcgcaacacttcatct

SEQ ID NO: 815105 - DNA, 19 bp, Mus musculus
  siRNA target sequence for BC020447 (NM_198886.2,1292-1310).
cgcaacacttcatcttcat

SEQ ID NO: 815106 - DNA, 19 bp, Mus musculus
  siRNA target sequence for BC020447 (NM_198886.2,1378-1396).
ggtgtcaagtcccattcat

SEQ ID NO: 815107 - DNA, 19 bp, Mus musculus
  siRNA target sequence for 2310010P21Rik (NM_198927.1,85-103).
gttggcaaagctagatctt

SEQ ID NO: 815108 - DNA, 19 bp, Mus musculus
  siRNA target sequence for 2310010P21Rik (NM_198927.1,128-146).
cttccctaggcggtcaaat

SEQ ID NO: 815109 - DNA, 19 bp, Mus musculus
  siRNA target sequence for 2310010P21Rik (NM_198927.1,132-150).
cctaggcggtcaaatgaga

SEQ ID NO: 815110 - DNA, 19 bp, Mus musculus
  siRNA target sequence for 2310010P21Rik (NM_198927.1,138-156).
cggtcaaatgagagtcttt

SEQ ID NO: 815111 - DNA, 19 bp, Mus musculus
  siRNA target sequence for 2310010P21Rik (NM_198927.1,140-158).
gtcaaatgagagtctttga

SEQ ID NO: 815112 - DNA, 19 bp, Mus musculus
  siRNA target sequence for 2310010P21Rik (NM_198927.1,142-160).
caaatgagagtctttgatt

SEQ ID NO: 815113 - DNA, 19 bp, Mus musculus
  siRNA target sequence for 2310010P21Rik (NM_198927.1,191-209).
ctggtgggagcaaagatta

SEQ ID NO: 815114 - DNA, 19 bp, Mus musculus
  siRNA target sequence for 2310010P21Rik (NM_198927.1,193-211).
ggtgggagcaaagattaca

SEQ ID NO: 815115 - DNA, 19 bp, Mus musculus
  siRNA target sequence for 2310010P21Rik (NM_198927.1,194-212).
gtgggagcaaagattacaa

SEQ ID NO: 815116 - DNA, 19 bp, Mus musculus
  siRNA target sequence for 2310010P21Rik (NM_198927.1,233-251).
gtaactcgagaaagaatct

SEQ ID NO: 815117 - DNA, 19 bp, Mus musculus
  siRNA target sequence for 2310010P21Rik (NM_198927.1,410-428).
gtggtgcccatggtaatat

SEQ ID NO: 815118 - DNA, 19 bp, Mus musculus
  siRNA target sequence for 2310010P21Rik (NM_198927.1,418-436).
catggtaatatcggtttaa

SEQ ID NO: 815119 - DNA, 19 bp, Mus musculus
  siRNA target sequence for 2310010P21Rik (NM_198927.1,430-448).
ggtttaagagctgaaatca

SEQ ID NO: 815120 - DNA, 19 bp, Mus musculus
  siRNA target sequence for 2310010P21Rik (NM_198927.1,485-503).
caagaggtagtctgaatgt

SEQ ID NO: 815121 - DNA, 19 bp, Mus musculus
  siRNA target sequence for 2310010P21Rik (NM_198927.1,498-516).
gaatgtgaatccgttaagt

SEQ ID NO: 815122 - DNA, 19 bp, Mus musculus
  siRNA target sequence for 2310010P21Rik (NM_198927.1,525-543).
caccaagtcaggaaatgat

SEQ ID NO: 815123 - DNA, 19 bp, Mus musculus
  siRNA target sequence for 2310010P21Rik (NM_198927.1,653-671).
caagtgaacatctgagtaa

SEQ ID NO: 815124 - DNA, 19 bp, Mus musculus
  siRNA target sequence for 2310010P21Rik (NM_198927.1,1474-1492).
gatgaagatagactcataa

SEQ ID NO: 815125 - DNA, 19 bp, Mus musculus
  siRNA target sequence for 2310010P21Rik (NM_198927.1,1531-1549).
gtcactgaagccagtcaat

SEQ ID NO: 815126 - DNA, 19 bp, Mus musculus
  siRNA target sequence for 2310010P21Rik (NM_198927.1,1568-1586).
cacaatcaagcaacaactt

SEQ ID NO: 815127 - DNA, 19 bp, Mus musculus
  siRNA target sequence for 2310010P21Rik (NM_198927.1,1666-1684).
gagggaatgagaaaattgt

SEQ ID NO: 815128 - DNA, 19 bp, Mus musculus
  siRNA target sequence for 2310010P21Rik (NM_198927.1,1761-1779).
gtcgaatgtgcatctatca

SEQ ID NO: 815129 - DNA, 19 bp, Mus musculus
  siRNA target sequence for 2310010P21Rik (NM_198927.1,1763-1781).
cgaatgtgcatctatcaga

SEQ ID NO: 815130 - DNA, 19 bp, Mus musculus
  siRNA target sequence for 2310010P21Rik (NM_198927.1,1764-1782).
gaatgtgcatctatcagat

SEQ ID NO: 815131 - DNA, 19 bp, Mus musculus
  siRNA target sequence for 2310010P21Rik (NM_198927.1,1864-1882).
gagagcagcaattcatcta

SEQ ID NO: 815132 - DNA, 19 bp, Mus musculus
  siRNA target sequence for 2310010P21Rik (NM_198927.1,1907-1925).
gaggtgactccaatgaagt

SEQ ID NO: 815133 - DNA, 19 bp, Mus musculus
  siRNA target sequence for 2310010P21Rik (NM_198927.1,2017-2035).
gagggggttggagagaata

SEQ ID NO: 815134 - DNA, 19 bp, Mus musculus
  siRNA target sequence for 2310010P21Rik (NM_198927.1,2022-2040).
ggttggagagaataatggt

SEQ ID NO: 815135 - DNA, 19 bp, Mus musculus
  siRNA target sequence for 2310010P21Rik (NM_198927.1,2060-2078).
gcttggatactggaagtaa

SEQ ID NO: 815136 - DNA, 19 bp, Mus musculus
  siRNA target sequence for 2310010P21Rik (NM_198927.1,2083-2101).
gactcaggaagccataatt

SEQ ID NO: 815137 - DNA, 19 bp, Mus musculus
  siRNA target sequence for 2310010P21Rik (NM_198927.1,2111-2129).
ggtctggaagtagaagtaa

SEQ ID NO: 815138 - DNA, 19 bp, Mus musculus
  siRNA target sequence for 2310010P21Rik (NM_198927.1,2112-2130).
gtctggaagtagaagtaat

SEQ ID NO: 815139 - DNA, 19 bp, Mus musculus
  siRNA target sequence for 2310010P21Rik (NM_198927.1,2179-2197).
ggtgttagtggcagagtta

SEQ ID NO: 815140 - DNA, 19 bp, Mus musculus
  siRNA target sequence for D17Ertd441e (NM_198937.1,122-140).
caagcaagcctaataggat

SEQ ID NO: 815141 - DNA, 19 bp, Mus musculus
  siRNA target sequence for AW494914 (NM_198942.1,501-519).
gaggcaaaggtcacatgaa

SEQ ID NO: 815142 - DNA, 19 bp, Mus musculus
  siRNA target sequence for AW494914 (NM_198942.1,503-521).
ggcaaaggtcacatgaata

SEQ ID NO: 815143 - DNA, 19 bp, Mus musculus
  siRNA target sequence for AW494914 (NM_198942.1,510-528).
gtcacatgaataaatctca

SEQ ID NO: 815144 - DNA, 19 bp, Mus musculus
  siRNA target sequence for AW494914 (NM_198942.1,577-595).
cagtagaaaggcctcaaat

SEQ ID NO: 815145 - DNA, 19 bp, Mus musculus
  siRNA target sequence for AW494914 (NM_198942.1,582-600).
gaaaggcctcaaatagaat

SEQ ID NO: 815146 - DNA, 19 bp, Mus musculus
  siRNA target sequence for AW494914 (NM_198942.1,605-623).
gatgatggcgatgactttt

SEQ ID NO: 815147 - DNA, 19 bp, Mus musculus
  siRNA target sequence for AW494914 (NM_198942.1,723-741).
gacaagagcctatctttct

SEQ ID NO: 815148 - DNA, 19 bp, Mus musculus
  siRNA target sequence for AW494914 (NM_198942.1,751-769).
cagtccttgggaatatata

SEQ ID NO: 815149 - DNA, 19 bp, Mus musculus
  siRNA target sequence for AW494914 (NM_198942.1,903-921).
cggcactagagcatcttct

SEQ ID NO: 815150 - DNA, 19 bp, Mus musculus
  siRNA target sequence for AW494914 (NM_198942.1,1044-1062).
gcggagaaaaattcataga

SEQ ID NO: 815151 - DNA, 19 bp, Mus musculus
  siRNA target sequence for AW494914 (NM_198942.1,1091-1109).
ggattggaactggattatt

SEQ ID NO: 815152 - DNA, 19 bp, Mus musculus
  siRNA target sequence for AW494914 (NM_198942.1,1097-1115).
gaactggattatttgacaa

SEQ ID NO: 815153 - DNA, 19 bp, Mus musculus
  siRNA target sequence for AW494914 (NM_198942.1,1100-1118).
ctggattatttgacaaaca

SEQ ID NO: 815154 - DNA, 19 bp, Mus musculus
  siRNA target sequence for AW494914 (NM_198942.1,1125-1143).
gcaagtctaagcaaaagga

SEQ ID NO: 815155 - DNA, 19 bp, Mus musculus
  siRNA target sequence for AW494914 (NM_198942.1,1170-1188).
cgcctgaaacctgtaaatt

SEQ ID NO: 815156 - DNA, 19 bp, Mus musculus
  siRNA target sequence for AW494914 (NM_198942.1,1266-1284).
gagcagaaagaaacgtaaa

SEQ ID NO: 815157 - DNA, 19 bp, Mus musculus
  siRNA target sequence for AW494914 (NM_198942.1,1269-1287).
cagaaagaaacgtaaatga

SEQ ID NO: 815158 - DNA, 19 bp, Mus musculus
  siRNA target sequence for AW494914 (NM_198942.1,1304-1322).
gatgacgacacaaccttta

SEQ ID NO: 815159 - DNA, 19 bp, Mus musculus
  siRNA target sequence for AW494914 (NM_198942.1,1307-1325).
gacgacacaacctttatgt

SEQ ID NO: 815160 - DNA, 19 bp, Mus musculus
  siRNA target sequence for AW494914 (NM_198942.1,1309-1327).
cgacacaacctttatgtat

SEQ ID NO: 815161 - DNA, 19 bp, Mus musculus
  siRNA target sequence for AW494914 (NM_198942.1,1330-1348).
gcttcagattcgcttttct

SEQ ID NO: 815162 - DNA, 19 bp, Mus musculus
  siRNA target sequence for AW494914 (NM_198942.1,1331-1349).
cttcagattcgcttttcta

SEQ ID NO: 815163 - DNA, 19 bp, Mus musculus
  siRNA target sequence for AW494914 (NM_198942.1,1374-1392).
ctcccctggtggcatttta

SEQ ID NO: 815164 - DNA, 19 bp, Mus musculus
  siRNA target sequence for AW494914 (NM_198942.1,1379-1397).
ctggtggcattttattcca

SEQ ID NO: 815165 - DNA, 19 bp, Mus musculus
  siRNA target sequence for AW494914 (NM_198942.1,1413-1431).
ctctggcttgtcgtttaca

SEQ ID NO: 815166 - DNA, 19 bp, Mus musculus
  siRNA target sequence for AW494914 (NM_198942.1,1415-1433).
ctggcttgtcgtttacata

SEQ ID NO: 815167 - DNA, 19 bp, Mus musculus
  siRNA target sequence for AW494914 (NM_198942.1,1422-1440).
gtcgtttacatatttctga

SEQ ID NO: 815168 - DNA, 19 bp, Mus musculus
  siRNA target sequence for AW494914 (NM_198942.1,1522-1540).
gtcagagattgtcaagtta

SEQ ID NO: 815169 - DNA, 19 bp, Mus musculus
  siRNA target sequence for AW494914 (NM_198942.1,1524-1542).
cagagattgtcaagttact

SEQ ID NO: 815170 - DNA, 19 bp, Mus musculus
  siRNA target sequence for AW494914 (NM_198942.1,1526-1544).
gagattgtcaagttactaa

SEQ ID NO: 815171 - DNA, 19 bp, Mus musculus
  siRNA target sequence for AW494914 (NM_198942.1,1634-1652).
ccagtggtcccaagtaaca

SEQ ID NO: 815172 - DNA, 19 bp, Mus musculus
  siRNA target sequence for AW494914 (NM_198942.1,1657-1675).
cctttctaatcaaatgcta

SEQ ID NO: 815173 - DNA, 19 bp, Mus musculus
  siRNA target sequence for AW494914 (NM_198942.1,1673-1691).
ctagaaggggaaagattgt

SEQ ID NO: 815174 - DNA, 19 bp, Mus musculus
  siRNA target sequence for AW494914 (NM_198942.1,1721-1739).
gaaggacctgcatcaatta

SEQ ID NO: 815175 - DNA, 19 bp, Mus musculus
  siRNA target sequence for AW494914 (NM_198942.1,1725-1743).
gacctgcatcaattatcgt

SEQ ID NO: 815176 - DNA, 19 bp, Mus musculus
  siRNA target sequence for AW494914 (NM_198942.1,1734-1752).
caattatcgtggagaatga

SEQ ID NO: 815177 - DNA, 19 bp, Mus musculus
  siRNA target sequence for AW494914 (NM_198942.1,1745-1763).
gagaatgaaagctatgtga

SEQ ID NO: 815178 - DNA, 19 bp, Mus musculus
  siRNA target sequence for AW494914 (NM_198942.1,1768-1786).
gaagaagaggagttacaaa

SEQ ID NO: 815179 - DNA, 19 bp, Mus musculus
  siRNA target sequence for AW494914 (NM_198942.1,1817-1835).
gctgagaacagtaagatct

SEQ ID NO: 815180 - DNA, 19 bp, Mus musculus
  siRNA target sequence for AW494914 (NM_198942.1,1866-1884).
gacagttccacgcaattct

SEQ ID NO: 815181 - DNA, 19 bp, Mus musculus
  siRNA target sequence for AW494914 (NM_198942.1,1878-1896).
caattctgcaagaaagaca

SEQ ID NO: 815182 - DNA, 19 bp, Mus musculus
  siRNA target sequence for AW494914 (NM_198942.1,1948-1966).
gcaccaagtggttgtcata

SEQ ID NO: 815183 - DNA, 19 bp, Mus musculus
  siRNA target sequence for AW494914 (NM_198942.1,1949-1967).
caccaagtggttgtcataa

SEQ ID NO: 815184 - DNA, 19 bp, Mus musculus
  siRNA target sequence for AW494914 (NM_198942.1,1995-2013).
cacagattccacagtttat

SEQ ID NO: 815185 - DNA, 19 bp, Mus musculus
  siRNA target sequence for AW494914 (NM_198942.1,2008-2026).
gtttatcctggataattct

SEQ ID NO: 815186 - DNA, 19 bp, Mus musculus
  siRNA target sequence for AW494914 (NM_198942.1,2042-2060).
gagagggtggccaacatca

SEQ ID NO: 815187 - DNA, 19 bp, Mus musculus
  siRNA target sequence for AW494914 (NM_198942.1,2100-2118).
ctgaacgggttgctaaaga

SEQ ID NO: 815188 - DNA, 19 bp, Mus musculus
  siRNA target sequence for AW494914 (NM_198942.1,2102-2120).
gaacgggttgctaaagaaa

SEQ ID NO: 815189 - DNA, 19 bp, Mus musculus
  siRNA target sequence for AW494914 (NM_198942.1,2183-2201).
gccaccagactgttatact

SEQ ID NO: 815190 - DNA, 19 bp, Mus musculus
  siRNA target sequence for AW494914 (NM_198942.1,2257-2275).
cacccacatcattgttgat

SEQ ID NO: 815191 - DNA, 19 bp, Mus musculus
  siRNA target sequence for AW494914 (NM_198942.1,2303-2321).
gacttcttactgctagttt

SEQ ID NO: 815192 - DNA, 19 bp, Mus musculus
  siRNA target sequence for AW494914 (NM_198942.1,2437-2455).
ccgtgcatttcctgttgat

SEQ ID NO: 815193 - DNA, 19 bp, Mus musculus
  siRNA target sequence for AW494914 (NM_198942.1,2480-2498).
gctgtgacgaggtatgtgt

SEQ ID NO: 815194 - DNA, 19 bp, Mus musculus
  siRNA target sequence for AW494914 (NM_198942.1,2481-2499).
ctgtgacgaggtatgtgtt

SEQ ID NO: 815195 - DNA, 19 bp, Mus musculus
  siRNA target sequence for AW494914 (NM_198942.1,2501-2519).
caggacgggagcccatata

SEQ ID NO: 815196 - DNA, 19 bp, Mus musculus
  siRNA target sequence for AW494914 (NM_198942.1,2649-2667).
caatacctgatcaacagtt

SEQ ID NO: 815197 - DNA, 19 bp, Mus musculus
  siRNA target sequence for AW494914 (NM_198942.1,2678-2696).
cagctcttgatccgttata

SEQ ID NO: 815198 - DNA, 19 bp, Mus musculus
  siRNA target sequence for AW494914 (NM_198942.1,2869-2887).
gcagctacagtctaactct

SEQ ID NO: 815199 - DNA, 19 bp, Mus musculus
  siRNA target sequence for AW494914 (NM_198942.1,2873-2891).
ctacagtctaactctcttt

SEQ ID NO: 815200 - DNA, 19 bp, Mus musculus
  siRNA target sequence for AW494914 (NM_198942.1,2876-2894).
cagtctaactctcttttca

SEQ ID NO: 815201 - DNA, 19 bp, Mus musculus
  siRNA target sequence for AW494914 (NM_198942.1,2903-2921).
cgcagtcaccgatgtgtaa

SEQ ID NO: 815202 - DNA, 19 bp, Mus musculus
  siRNA target sequence for AW494914 (NM_198942.1,2904-2922).
gcagtcaccgatgtgtaat

SEQ ID NO: 815203 - DNA, 19 bp, Mus musculus
  siRNA target sequence for AW494914 (NM_198942.1,2905-2923).
cagtcaccgatgtgtaatt

SEQ ID NO: 815204 - DNA, 19 bp, Mus musculus
  siRNA target sequence for AW494914 (NM_198942.1,2907-2925).
gtcaccgatgtgtaattca

SEQ ID NO: 815205 - DNA, 19 bp, Mus musculus
  siRNA target sequence for AW494914 (NM_198942.1,2959-2977).
gcaggcggtgtttgtgaaa

SEQ ID NO: 815206 - DNA, 19 bp, Mus musculus
  siRNA target sequence for AW494914 (NM_198942.1,2978-2996).
cctccaatgggtgtaacta

SEQ ID NO: 815207 - DNA, 19 bp, Mus musculus
  siRNA target sequence for AW494914 (NM_198942.1,2981-2999).
ccaatgggtgtaactaaga

SEQ ID NO: 815208 - DNA, 19 bp, Mus musculus
  siRNA target sequence for AW494914 (NM_198942.1,2982-3000).
caatgggtgtaactaagat

SEQ ID NO: 815209 - DNA, 19 bp, Mus musculus
  siRNA target sequence for AW494914 (NM_198942.1,2990-3008).
gtaactaagattatcattt

SEQ ID NO: 815210 - DNA, 19 bp, Mus musculus
  siRNA target sequence for AW494914 (NM_198942.1,3020-3038).
gctgagacgtctataacca

SEQ ID NO: 815211 - DNA, 19 bp, Mus musculus
  siRNA target sequence for AW494914 (NM_198942.1,3021-3039).
ctgagacgtctataaccat

SEQ ID NO: 815212 - DNA, 19 bp, Mus musculus
  siRNA target sequence for AW494914 (NM_198942.1,3025-3043).
gacgtctataaccattgat

SEQ ID NO: 815213 - DNA, 19 bp, Mus musculus
  siRNA target sequence for AW494914 (NM_198942.1,3027-3045).
cgtctataaccattgatga

SEQ ID NO: 815214 - DNA, 19 bp, Mus musculus
  siRNA target sequence for AW494914 (NM_198942.1,3028-3046).
gtctataaccattgatgat

SEQ ID NO: 815215 - DNA, 19 bp, Mus musculus
  siRNA target sequence for AW494914 (NM_198942.1,3037-3055).
cattgatgatgttgtgtat

SEQ ID NO: 815216 - DNA, 19 bp, Mus musculus
  siRNA target sequence for AW494914 (NM_198942.1,3186-3204).
gggtctgcttccacttgtt

SEQ ID NO: 815217 - DNA, 19 bp, Mus musculus
  siRNA target sequence for AW494914 (NM_198942.1,3346-3364).
cattgaacctccacatatt

SEQ ID NO: 815218 - DNA, 19 bp, Mus musculus
  siRNA target sequence for AW494914 (NM_198942.1,3354-3372).
ctccacatattgattctct

SEQ ID NO: 815219 - DNA, 19 bp, Mus musculus
  siRNA target sequence for AW494914 (NM_198942.1,3408-3426).
ccttgactccagatgaaaa

SEQ ID NO: 815220 - DNA, 19 bp, Mus musculus
  siRNA target sequence for AW494914 (NM_198942.1,3537-3555).
ctgccagcttggctttcaa

SEQ ID NO: 815221 - DNA, 19 bp, Mus musculus
  siRNA target sequence for AW494914 (NM_198942.1,3539-3557).
gccagcttggctttcaagt

SEQ ID NO: 815222 - DNA, 19 bp, Mus musculus
  siRNA target sequence for AW494914 (NM_198942.1,3568-3586).
gtctccctgggataagaaa

SEQ ID NO: 815223 - DNA, 19 bp, Mus musculus
  siRNA target sequence for AW494914 (NM_198942.1,3607-3625).
gctggagtttgcatttgca

SEQ ID NO: 815224 - DNA, 19 bp, Mus musculus
  siRNA target sequence for AW494914 (NM_198942.1,3608-3626).
ctggagtttgcatttgcaa

SEQ ID NO: 815225 - DNA, 19 bp, Mus musculus
  siRNA target sequence for AW494914 (NM_198942.1,3632-3650).
gattacctggcccttctat

SEQ ID NO: 815226 - DNA, 19 bp, Mus musculus
  siRNA target sequence for AW494914 (NM_198942.1,3640-3658).
ggcccttctatgtgcatat

SEQ ID NO: 815227 - DNA, 19 bp, Mus musculus
  siRNA target sequence for AW494914 (NM_198942.1,3662-3680).
ggttggcagctgagtacaa

SEQ ID NO: 815228 - DNA, 19 bp, Mus musculus
  siRNA target sequence for AW494914 (NM_198942.1,3663-3681).
gttggcagctgagtacaaa

SEQ ID NO: 815229 - DNA, 19 bp, Mus musculus
  siRNA target sequence for AW494914 (NM_198942.1,3667-3685).
gcagctgagtacaaaagaa

SEQ ID NO: 815230 - DNA, 19 bp, Mus musculus
  siRNA target sequence for AW494914 (NM_198942.1,3689-3707).
gcacgagcaagctataatt

SEQ ID NO: 815231 - DNA, 19 bp, Mus musculus
  siRNA target sequence for AW494914 (NM_198942.1,3690-3708).
cacgagcaagctataatta

SEQ ID NO: 815232 - DNA, 19 bp, Mus musculus
  siRNA target sequence for AW494914 (NM_198942.1,3757-3775).
cctcaaacgacaattcact

SEQ ID NO: 815233 - DNA, 19 bp, Mus musculus
  siRNA target sequence for AW494914 (NM_198942.1,3787-3805).
cgacatagggtttgtgaaa

SEQ ID NO: 815234 - DNA, 19 bp, Mus musculus
  siRNA target sequence for AW494914 (NM_198942.1,3809-3827).
ggactccgagcaaaagaaa

SEQ ID NO: 815235 - DNA, 19 bp, Mus musculus
  siRNA target sequence for AW494914 (NM_198942.1,3872-3890).
ggagaggaggctaacacaa

SEQ ID NO: 815236 - DNA, 19 bp, Mus musculus
  siRNA target sequence for AW494914 (NM_198942.1,3873-3891).
gagaggaggctaacacaaa

SEQ ID NO: 815237 - DNA, 19 bp, Mus musculus
  siRNA target sequence for AW494914 (NM_198942.1,3896-3914).
gagaaccccaagctgatat

SEQ ID NO: 815238 - DNA, 19 bp, Mus musculus
  siRNA target sequence for AW494914 (NM_198942.1,3898-3916).
gaaccccaagctgatatca

SEQ ID NO: 815239 - DNA, 19 bp, Mus musculus
  siRNA target sequence for AW494914 (NM_198942.1,3922-3940).
gctgtgtgccgctctgtat

SEQ ID NO: 815240 - DNA, 19 bp, Mus musculus
  siRNA target sequence for AW494914 (NM_198942.1,3927-3945).
gtgccgctctgtatccaaa

SEQ ID NO: 815241 - DNA, 19 bp, Mus musculus
  siRNA target sequence for AW494914 (NM_198942.1,3931-3949).
cgctctgtatccaaacgta

SEQ ID NO: 815242 - DNA, 19 bp, Mus musculus
  siRNA target sequence for AW494914 (NM_198942.1,4022-4040).
gctgagctgaagttcgtta

SEQ ID NO: 815243 - DNA, 19 bp, Mus musculus
  siRNA target sequence for AW494914 (NM_198942.1,4114-4132).
cctgttgtaccatgagaaa

SEQ ID NO: 815244 - DNA, 19 bp, Mus musculus
  siRNA target sequence for AW494914 (NM_198942.1,4115-4133).
ctgttgtaccatgagaaaa

SEQ ID NO: 815245 - DNA, 19 bp, Mus musculus
  siRNA target sequence for AW494914 (NM_198942.1,4165-4183).
cagcatggtgtctgtgtat

SEQ ID NO: 815246 - DNA, 19 bp, Mus musculus
  siRNA target sequence for AW494914 (NM_198942.1,4383-4401).
cgaggggctctcggattat

SEQ ID NO: 815247 - DNA, 19 bp, Mus musculus
  siRNA target sequence for Nox3 (NM_198958.1,3-21).
gcaacgcacaggctcaaat

SEQ ID NO: 815248 - DNA, 19 bp, Mus musculus
  siRNA target sequence for Nox3 (NM_198958.1,22-40).
ggacggaaaggaataacgt

SEQ ID NO: 815249 - DNA, 19 bp, Mus musculus
  siRNA target sequence for Nox3 (NM_198958.1,121-139).
gcagtaaacgcctatctgt

SEQ ID NO: 815250 - DNA, 19 bp, Mus musculus
  siRNA target sequence for Nox3 (NM_198958.1,122-140).
cagtaaacgcctatctgtt

SEQ ID NO: 815251 - DNA, 19 bp, Mus musculus
  siRNA target sequence for Nox3 (NM_198958.1,124-142).
gtaaacgcctatctgttta

SEQ ID NO: 815252 - DNA, 19 bp, Mus musculus
  siRNA target sequence for Nox3 (NM_198958.1,130-148).
gcctatctgtttattgaca

SEQ ID NO: 815253 - DNA, 19 bp, Mus musculus
  siRNA target sequence for Nox3 (NM_198958.1,147-165).
cacattcttctggtatact

SEQ ID NO: 815254 - DNA, 19 bp, Mus musculus
  siRNA target sequence for Nox3 (NM_198958.1,149-167).
cattcttctggtatactga

SEQ ID NO: 815255 - DNA, 19 bp, Mus musculus
  siRNA target sequence for Nox3 (NM_198958.1,171-189).
ggaggctttcttttataca

SEQ ID NO: 815256 - DNA, 19 bp, Mus musculus
  siRNA target sequence for Nox3 (NM_198958.1,180-198).
cttttatacacgagttatt

SEQ ID NO: 815257 - DNA, 19 bp, Mus musculus
  siRNA target sequence for Nox3 (NM_198958.1,252-270).
ctgcatgctaattctgtta

SEQ ID NO: 815258 - DNA, 19 bp, Mus musculus
  siRNA target sequence for Nox3 (NM_198958.1,271-289).
cctgtcagtcggaacttca

SEQ ID NO: 815259 - DNA, 19 bp, Mus musculus
  siRNA target sequence for Nox3 (NM_198958.1,272-290).
ctgtcagtcggaacttcat

SEQ ID NO: 815260 - DNA, 19 bp, Mus musculus
  siRNA target sequence for Nox3 (NM_198958.1,274-292).
gtcagtcggaacttcattt

SEQ ID NO: 815261 - DNA, 19 bp, Mus musculus
  siRNA target sequence for Nox3 (NM_198958.1,378-396).
ctacgggatagctgtcaat

SEQ ID NO: 815262 - DNA, 19 bp, Mus musculus
  siRNA target sequence for Nox3 (NM_198958.1,383-401).
ggatagctgtcaattcagt

SEQ ID NO: 815263 - DNA, 19 bp, Mus musculus
  siRNA target sequence for Nox3 (NM_198958.1,477-495).
ggctgcactttccaaactt

SEQ ID NO: 815264 - DNA, 19 bp, Mus musculus
  siRNA target sequence for Nox3 (NM_198958.1,496-514).
ggcgatgccccaaatgaga

SEQ ID NO: 815265 - DNA, 19 bp, Mus musculus
  siRNA target sequence for Nox3 (NM_198958.1,526-544).
ccagtccgcacctttgata

SEQ ID NO: 815266 - DNA, 19 bp, Mus musculus
  siRNA target sequence for Nox3 (NM_198958.1,527-545).
cagtccgcacctttgatat

SEQ ID NO: 815267 - DNA, 19 bp, Mus musculus
  siRNA target sequence for Nox3 (NM_198958.1,626-644).
cctcttcaaccgaattcat

SEQ ID NO: 815268 - DNA, 19 bp, Mus musculus
  siRNA target sequence for Nox3 (NM_198958.1,642-660).
catcagaaggtcctcttat

SEQ ID NO: 815269 - DNA, 19 bp, Mus musculus
  siRNA target sequence for Nox3 (NM_198958.1,677-695).
cacaccatatctttgtctt

SEQ ID NO: 815270 - DNA, 19 bp, Mus musculus
  siRNA target sequence for Nox3 (NM_198958.1,720-738).
cggaggaggtcgcatcatt

SEQ ID NO: 815271 - DNA, 19 bp, Mus musculus
  siRNA target sequence for Nox3 (NM_198958.1,758-776).
gtctccggctgcacaatgt

SEQ ID NO: 815272 - DNA, 19 bp, Mus musculus
  siRNA target sequence for Nox3 (NM_198958.1,876-894).
gggtcctgtggtcttgtat

SEQ ID NO: 815273 - DNA, 19 bp, Mus musculus
  siRNA target sequence for Nox3 (NM_198958.1,888-906).
cttgtatgcgtgtgaaaga

SEQ ID NO: 815274 - DNA, 19 bp, Mus musculus
  siRNA target sequence for Nox3 (NM_198958.1,891-909).
gtatgcgtgtgaaagaata

SEQ ID NO: 815275 - DNA, 19 bp, Mus musculus
  siRNA target sequence for Nox3 (NM_198958.1,895-913).
gcgtgtgaaagaataatta

SEQ ID NO: 815276 - DNA, 19 bp, Mus musculus
  siRNA target sequence for Nox3 (NM_198958.1,1146-1164).
gttattgaaggcctttaga

SEQ ID NO: 815277 - DNA, 19 bp, Mus musculus
  siRNA target sequence for Nox3 (NM_198958.1,1232-1250).
gctctctggcagatgtatt

SEQ ID NO: 815278 - DNA, 19 bp, Mus musculus
  siRNA target sequence for Nox3 (NM_198958.1,1237-1255).
ctggcagatgtatttcact

SEQ ID NO: 815279 - DNA, 19 bp, Mus musculus
  siRNA target sequence for Nox3 (NM_198958.1,1261-1279).
gtgagcgtgtgcattgcaa

SEQ ID NO: 815280 - DNA, 19 bp, Mus musculus
  siRNA target sequence for Nox3 (NM_198958.1,1272-1290).
cattgcaacgggaattgga

SEQ ID NO: 815281 - DNA, 19 bp, Mus musculus
  siRNA target sequence for Nox3 (NM_198958.1,1326-1344).
gtataagtgttgtgaatca

SEQ ID NO: 815282 - DNA, 19 bp, Mus musculus
  siRNA target sequence for Nox3 (NM_198958.1,1362-1380).
gagcaaggtgtacttctat

SEQ ID NO: 815283 - DNA, 19 bp, Mus musculus
  siRNA target sequence for Nox3 (NM_198958.1,1389-1407).
ccgggatgccggagcattt

SEQ ID NO: 815284 - DNA, 19 bp, Mus musculus
  siRNA target sequence for Nox3 (NM_198958.1,1391-1409).
gggatgccggagcatttga

SEQ ID NO: 815285 - DNA, 19 bp, Mus musculus
  siRNA target sequence for Nox3 (NM_198958.1,1393-1411).
gatgccggagcatttgagt

SEQ ID NO: 815286 - DNA, 19 bp, Mus musculus
  siRNA target sequence for Nox3 (NM_198958.1,1412-1430).
ggtttgctgatctgttact

SEQ ID NO: 815287 - DNA, 19 bp, Mus musculus
  siRNA target sequence for Nox3 (NM_198958.1,1513-1531).
caggcaattcacatagctt

SEQ ID NO: 815288 - DNA, 19 bp, Mus musculus
  siRNA target sequence for Nox3 (NM_198958.1,1515-1533).
ggcaattcacatagcttta

SEQ ID NO: 815289 - DNA, 19 bp, Mus musculus
  siRNA target sequence for Nox3 (NM_198958.1,1517-1535).
caattcacatagctttaca

SEQ ID NO: 815290 - DNA, 19 bp, Mus musculus
  siRNA target sequence for Nox3 (NM_198958.1,1528-1546).
gctttacactgggatgaaa

SEQ ID NO: 815291 - DNA, 19 bp, Mus musculus
  siRNA target sequence for Nox3 (NM_198958.1,1543-1561).
gaaagtctggatgtgataa

SEQ ID NO: 815292 - DNA, 19 bp, Mus musculus
  siRNA target sequence for Nox3 (NM_198958.1,1595-1613).
ccaactggaacgacgaatt

SEQ ID NO: 815293 - DNA, 19 bp, Mus musculus
  siRNA target sequence for Nox3 (NM_198958.1,1614-1632).
caagcagattgcctacaat

SEQ ID NO: 815294 - DNA, 19 bp, Mus musculus
  siRNA target sequence for Nox3 (NM_198958.1,1723-1741).
gatccgaggggcgttcatt

SEQ ID NO: 815295 - DNA, 19 bp, Mus musculus
  siRNA target sequence for Nox3 (NM_198958.1,1726-1744).
ccgaggggcgttcatttct

SEQ ID NO: 815296 - DNA, 19 bp, Mus musculus
  siRNA target sequence for Nox3 (NM_198958.1,1727-1745).
cgaggggcgttcatttcta

SEQ ID NO: 815297 - DNA, 19 bp, Mus musculus
  siRNA target sequence for Nox3 (NM_198958.1,1730-1748).
ggggcgttcatttctatta

SEQ ID NO: 815298 - DNA, 19 bp, Mus musculus
  siRNA target sequence for Nox3 (NM_198958.1,1732-1750).
ggcgttcatttctattaca

SEQ ID NO: 815299 - DNA, 19 bp, Mus musculus
  siRNA target sequence for Tcfap2e (NM_198960.1,609-627).
ccggtctggaggaattgca

SEQ ID NO: 815300 - DNA, 19 bp, Mus musculus
  siRNA target sequence for Tcfap2e (NM_198960.1,619-637).
ggaattgcaggcgatagat

SEQ ID NO: 815301 - DNA, 19 bp, Mus musculus
  siRNA target sequence for Tcfap2e (NM_198960.1,659-677).
gaccaatcggtgatcaaga

SEQ ID NO: 815302 - DNA, 19 bp, Mus musculus
  siRNA target sequence for Tcfap2e (NM_198960.1,661-679).
ccaatcggtgatcaagaaa

SEQ ID NO: 815303 - DNA, 19 bp, Mus musculus
  siRNA target sequence for Tcfap2e (NM_198960.1,804-822).
gctcaacatccaagtacaa

SEQ ID NO: 815304 - DNA, 19 bp, Mus musculus
  siRNA target sequence for Tcfap2e (NM_198960.1,899-917).
cgaagggccaagtccaaaa

SEQ ID NO: 815305 - DNA, 19 bp, Mus musculus
  siRNA target sequence for Tcfap2e (NM_198960.1,1043-1061).
cgggactttggttacgttt

SEQ ID NO: 815306 - DNA, 19 bp, Mus musculus
  siRNA target sequence for Tcfap2e (NM_198960.1,1057-1075).
cgtttgtgagactgagttt

SEQ ID NO: 815307 - DNA, 19 bp, Mus musculus
  siRNA target sequence for Arg99 (NM_198967.1,1125-1143).
ccttgagaccgtttttaaa

SEQ ID NO: 815308 - DNA, 19 bp, Mus musculus
  siRNA target sequence for Arg99 (NM_198967.1,1148-1166).
gccattttggtcatcagtt

SEQ ID NO: 815309 - DNA, 19 bp, Mus musculus
  siRNA target sequence for Arg99 (NM_198967.1,1149-1167).
ccattttggtcatcagtta

SEQ ID NO: 815310 - DNA, 19 bp, Mus musculus
  siRNA target sequence for Arg99 (NM_198967.1,1197-1215).
ggataatgggaggaactat

SEQ ID NO: 815311 - DNA, 19 bp, Mus musculus
  siRNA target sequence for Arg99 (NM_198967.1,1235-1253).
gacaatccagcttcattct

SEQ ID NO: 815312 - DNA, 19 bp, Mus musculus
  siRNA target sequence for Arg99 (NM_198967.1,1245-1263).
cttcattctcgccatacat

SEQ ID NO: 815313 - DNA, 19 bp, Mus musculus
  siRNA target sequence for Arg99 (NM_198967.1,1272-1290).
ggttccttacctattccta

SEQ ID NO: 815314 - DNA, 19 bp, Mus musculus
  siRNA target sequence for Arg99 (NM_198967.1,1466-1484).
ctggagcacaaggaagtat

SEQ ID NO: 815315 - DNA, 19 bp, Mus musculus
  siRNA target sequence for Arg99 (NM_198967.1,1501-1519).
cctcgtgttcccgttcatt

SEQ ID NO: 815316 - DNA, 19 bp, Mus musculus
  siRNA target sequence for Arg99 (NM_198967.1,1520-1538).
ccagccagcaacctattct

SEQ ID NO: 815317 - DNA, 19 bp, Mus musculus
  siRNA target sequence for Arg99 (NM_198967.1,1521-1539).
cagccagcaacctattctt

SEQ ID NO: 815318 - DNA, 19 bp, Mus musculus
  siRNA target sequence for Arg99 (NM_198967.1,1560-1578).
ccgagagagtcctgtacat

SEQ ID NO: 815319 - DNA, 19 bp, Mus musculus
  siRNA target sequence for Arg99 (NM_198967.1,1588-1606).
gggctactgcattctgttt

SEQ ID NO: 815320 - DNA, 19 bp, Mus musculus
  siRNA target sequence for Arg99 (NM_198967.1,1590-1608).
gctactgcattctgtttgt

SEQ ID NO: 815321 - DNA, 19 bp, Mus musculus
  siRNA target sequence for Arg99 (NM_198967.1,1730-1748).
ctgtcgagagagtccttat

SEQ ID NO: 815322 - DNA, 19 bp, Mus musculus
  siRNA target sequence for Arg99 (NM_198967.1,1930-1948).
gctgaaggaatccattaaa

SEQ ID NO: 815323 - DNA, 19 bp, Mus musculus
  siRNA target sequence for Arg99 (NM_198967.1,1933-1951).
gaaggaatccattaaatat

SEQ ID NO: 815324 - DNA, 19 bp, Mus musculus
  siRNA target sequence for Arg99 (NM_198967.1,1936-1954).
ggaatccattaaatatggt

SEQ ID NO: 815325 - DNA, 19 bp, Mus musculus
  siRNA target sequence for Arg99 (NM_198967.1,1996-2014).
ggcggagcaggaaagattt

SEQ ID NO: 815326 - DNA, 19 bp, Mus musculus
  siRNA target sequence for Arg99 (NM_198967.1,1997-2015).
gcggagcaggaaagattta

SEQ ID NO: 815327 - DNA, 19 bp, Mus musculus
  siRNA target sequence for Arg99 (NM_198967.1,2283-2301).
ctctgggagcgctctatta

SEQ ID NO: 815328 - DNA, 19 bp, Mus musculus
  siRNA target sequence for Arg99 (NM_198967.1,2285-2303).
ctgggagcgctctattaca

SEQ ID NO: 815329 - DNA, 19 bp, Mus musculus
  siRNA target sequence for Arg99 (NM_198967.1,2288-2306).
ggagcgctctattacaaca

SEQ ID NO: 815330 - DNA, 19 bp, Mus musculus
  siRNA target sequence for Arg99 (NM_198967.1,2528-2546).
gcactcgaggccatagaga

SEQ ID NO: 815331 - DNA, 19 bp, Mus musculus
  siRNA target sequence for Arg99 (NM_198967.1,2529-2547).
cactcgaggccatagagaa

SEQ ID NO: 815332 - DNA, 19 bp, Mus musculus
  siRNA target sequence for Arg99 (NM_198967.1,2566-2584).
caaggacccaaaagtcata

SEQ ID NO: 815333 - DNA, 19 bp, Mus musculus
  siRNA target sequence for Arg99 (NM_198967.1,2569-2587).
ggacccaaaagtcatatct

SEQ ID NO: 815334 - DNA, 19 bp, Mus musculus
  siRNA target sequence for Arg99 (NM_198967.1,2572-2590).
cccaaaagtcatatctgaa

SEQ ID NO: 815335 - DNA, 19 bp, Mus musculus
  siRNA target sequence for Arg99 (NM_198967.1,2744-2762).
gcaagggcctattatgaga

SEQ ID NO: 815336 - DNA, 19 bp, Mus musculus
  siRNA target sequence for Arg99 (NM_198967.1,2848-2866).
cagagaacgggatcaaaca

SEQ ID NO: 815337 - DNA, 19 bp, Mus musculus
  siRNA target sequence for 2010004I09Rik (NM_199008.1,447-465).
gtcaaggaccgggtcatta

SEQ ID NO: 815338 - DNA, 19 bp, Mus musculus
  siRNA target sequence for 2010004I09Rik (NM_199008.1,553-571).
ctgcactggcattttataa

SEQ ID NO: 815339 - DNA, 19 bp, Mus musculus
  siRNA target sequence for 2010004I09Rik (NM_199008.1,594-612).
ccagtaattggaatttcta

SEQ ID NO: 815340 - DNA, 19 bp, Mus musculus
  siRNA target sequence for 2010004I09Rik (NM_199008.1,636-654).
gctggacagtatttcaata

SEQ ID NO: 815341 - DNA, 19 bp, Mus musculus
  siRNA target sequence for 2010004I09Rik (NM_199008.1,639-657).
ggacagtatttcaataaga

SEQ ID NO: 815342 - DNA, 19 bp, Mus musculus
  siRNA target sequence for 2010004I09Rik (NM_199008.1,685-703).
ggcttaatccacaagaaga

SEQ ID NO: 815343 - DNA, 19 bp, Mus musculus
  siRNA target sequence for 2010004I09Rik (NM_199008.1,725-743).
ctacattgatcctgaattt

SEQ ID NO: 815344 - DNA, 19 bp, Mus musculus
  siRNA target sequence for 2010004I09Rik (NM_199008.1,768-786).
gtcgacctcatcactcttt

SEQ ID NO: 815345 - DNA, 19 bp, Mus musculus
  siRNA target sequence for 2010004I09Rik (NM_199008.1,776-794).
catcactctttcttacact

SEQ ID NO: 815346 - DNA, 19 bp, Mus musculus
  siRNA target sequence for 2010004I09Rik (NM_199008.1,825-843).
ccagttccaggctataatt

SEQ ID NO: 815347 - DNA, 19 bp, Mus musculus
  siRNA target sequence for 4632419K20Rik (NM_199009.1,426-444).
catgcctcatggtcttcaa

SEQ ID NO: 815348 - DNA, 19 bp, Mus musculus
  siRNA target sequence for 4632419K20Rik (NM_199009.1,433-451).
catggtcttcaagaatcat

SEQ ID NO: 815349 - DNA, 19 bp, Mus musculus
  siRNA target sequence for 4632419K20Rik (NM_199009.1,453-471).
ggtcccaggtggtacgaat

SEQ ID NO: 815350 - DNA, 19 bp, Mus musculus
  siRNA target sequence for 4632419K20Rik (NM_199009.1,501-519).
ctggaggtgcagatgatct

SEQ ID NO: 815351 - DNA, 19 bp, Mus musculus
  siRNA target sequence for 4632419K20Rik (NM_199009.1,531-549).
gaaaccacacgtaccaaat

SEQ ID NO: 815352 - DNA, 19 bp, Mus musculus
  siRNA target sequence for 4632419K20Rik (NM_199009.1,536-554).
cacacgtaccaaatgctaa

SEQ ID NO: 815353 - DNA, 19 bp, Mus musculus
  siRNA target sequence for 4632419K20Rik (NM_199009.1,540-558).
cgtaccaaatgctaacatt

SEQ ID NO: 815354 - DNA, 19 bp, Mus musculus
  siRNA target sequence for 4632419K20Rik (NM_199009.1,661-679).
gttgcaatgggatgagttt

SEQ ID NO: 815355 - DNA, 19 bp, Mus musculus
  siRNA target sequence for 4632419K20Rik (NM_199009.1,703-721).
ggctgaacagttgaaacta

SEQ ID NO: 815356 - DNA, 19 bp, Mus musculus
  siRNA target sequence for 4632419K20Rik (NM_199009.1,704-722).
gctgaacagttgaaactat

SEQ ID NO: 815357 - DNA, 19 bp, Mus musculus
  siRNA target sequence for 4632419K20Rik (NM_199009.1,705-723).
ctgaacagttgaaactatt

SEQ ID NO: 815358 - DNA, 19 bp, Mus musculus
  siRNA target sequence for 4632419K20Rik (NM_199009.1,897-915).
cactgctcgagttcttctt

SEQ ID NO: 815359 - DNA, 19 bp, Mus musculus
  siRNA target sequence for 4632419K20Rik (NM_199009.1,1009-1027).
ggcccgtgatgctctactt

SEQ ID NO: 815360 - DNA, 19 bp, Mus musculus
  siRNA target sequence for 4632419K20Rik (NM_199009.1,1076-1094).
gcagatcactcttacttct

SEQ ID NO: 815361 - DNA, 19 bp, Mus musculus
  siRNA target sequence for 4632419K20Rik (NM_199009.1,1134-1152).
cactgcctcgaaagattga

SEQ ID NO: 815362 - DNA, 19 bp, Mus musculus
  siRNA target sequence for 4632419K20Rik (NM_199009.1,1208-1226).
gcccttgcactcttcatga

SEQ ID NO: 815363 - DNA, 19 bp, Mus musculus
  siRNA target sequence for 4632419K20Rik (NM_199009.1,1211-1229).
cttgcactcttcatgagtt

SEQ ID NO: 815364 - DNA, 19 bp, Mus musculus
  siRNA target sequence for 4632419K20Rik (NM_199009.1,1279-1297).
gaagcagctggttgattat

SEQ ID NO: 815365 - DNA, 19 bp, Mus musculus
  siRNA target sequence for 4632419K20Rik (NM_199009.1,1282-1300).
gcagctggttgattatatt

SEQ ID NO: 815366 - DNA, 19 bp, Mus musculus
  siRNA target sequence for 4632419K20Rik (NM_199009.1,1286-1304).
ctggttgattatattcaca

SEQ ID NO: 815367 - DNA, 19 bp, Mus musculus
  siRNA target sequence for 4632419K20Rik (NM_199009.1,1374-1392).
ccgcctacctggaactttt

SEQ ID NO: 815368 - DNA, 19 bp, Mus musculus
  siRNA target sequence for 4632419K20Rik (NM_199009.1,1435-1453).
gcgattcctgttgttacat

SEQ ID NO: 815369 - DNA, 19 bp, Mus musculus
  siRNA target sequence for 4632419K20Rik (NM_199009.1,1662-1680).
gacgagcagctgacaagtt

SEQ ID NO: 815370 - DNA, 19 bp, Mus musculus
  siRNA target sequence for 4632419K20Rik (NM_199009.1,1678-1696).
gtttctctccctaatacca

SEQ ID NO: 815371 - DNA, 19 bp, Mus musculus
  siRNA target sequence for 4632419K20Rik (NM_199009.1,1782-1800).
cttcgtcagtggtaacagt

SEQ ID NO: 815372 - DNA, 19 bp, Mus musculus
  siRNA target sequence for 4632419K20Rik (NM_199009.1,1953-1971).
ctggtgagctagaagacaa

SEQ ID NO: 815373 - DNA, 19 bp, Mus musculus
  siRNA target sequence for 4632419K20Rik (NM_199009.1,2034-2052).
cctggtctgccccttatga

SEQ ID NO: 815374 - DNA, 19 bp, Mus musculus
  siRNA target sequence for 4632419K20Rik (NM_199009.1,2035-2053).
ctggtctgccccttatgat

SEQ ID NO: 815375 - DNA, 19 bp, Mus musculus
  siRNA target sequence for 4632419K20Rik (NM_199009.1,2785-2803).
ccctgctctgctatccaaa

SEQ ID NO: 815376 - DNA, 19 bp, Mus musculus
  siRNA target sequence for 4632419K20Rik (NM_199009.1,2795-2813).
ctatccaaagccaagaagt

SEQ ID NO: 815377 - DNA, 19 bp, Mus musculus
  siRNA target sequence for 4632419K20Rik (NM_199009.1,2905-2923).
gccatccttgggggaatta

SEQ ID NO: 815378 - DNA, 19 bp, Mus musculus
  siRNA target sequence for 4632419K20Rik (NM_199009.1,2907-2925).
catccttgggggaattact

SEQ ID NO: 815379 - DNA, 19 bp, Mus musculus
  siRNA target sequence for 4632419K20Rik (NM_199009.1,3082-3100).
ggctcttcgagtcaagaat

SEQ ID NO: 815380 - DNA, 19 bp, Mus musculus
  siRNA target sequence for 4632419K20Rik (NM_199009.1,3170-3188).
gtcacctcgcctttcttgt

SEQ ID NO: 815381 - DNA, 19 bp, Mus musculus
  siRNA target sequence for 4632419K20Rik (NM_199009.1,3195-3213).
cttcagaggaggtatctct

SEQ ID NO: 815382 - DNA, 19 bp, Mus musculus
  siRNA target sequence for BC034086 (NM_199012.1,406-424).
gagattggcctggaataaa

SEQ ID NO: 815383 - DNA, 19 bp, Mus musculus
  siRNA target sequence for BC034086 (NM_199012.1,408-426).
gattggcctggaataaaaa

SEQ ID NO: 815384 - DNA, 19 bp, Mus musculus
  siRNA target sequence for BC034086 (NM_199012.1,427-445).
ctgatgatcggaatgatta

SEQ ID NO: 815385 - DNA, 19 bp, Mus musculus
  siRNA target sequence for BC034086 (NM_199012.1,429-447).
gatgatcggaatgattaca

SEQ ID NO: 815386 - DNA, 19 bp, Mus musculus
  siRNA target sequence for BC034086 (NM_199012.1,499-517).
cccagtctcggatcaatat

SEQ ID NO: 815387 - DNA, 19 bp, Mus musculus
  siRNA target sequence for BC034086 (NM_199012.1,500-518).
ccagtctcggatcaatata

SEQ ID NO: 815388 - DNA, 19 bp, Mus musculus
  siRNA target sequence for BC034086 (NM_199012.1,501-519).
cagtctcggatcaatatat

SEQ ID NO: 815389 - DNA, 19 bp, Mus musculus
  siRNA target sequence for BC034086 (NM_199012.1,505-523).
ctcggatcaatatatgtga

SEQ ID NO: 815390 - DNA, 19 bp, Mus musculus
  siRNA target sequence for BC034086 (NM_199012.1,507-525).
cggatcaatatatgtgaaa

SEQ ID NO: 815391 - DNA, 19 bp, Mus musculus
  siRNA target sequence for BC034086 (NM_199012.1,512-530).
caatatatgtgaaaactat

SEQ ID NO: 815392 - DNA, 19 bp, Mus musculus
  siRNA target sequence for BC034086 (NM_199012.1,714-732).
gacatcgaagcaaagtcta

SEQ ID NO: 815393 - DNA, 19 bp, Mus musculus
  siRNA target sequence for BC034086 (NM_199012.1,716-734).
catcgaagcaaagtctaaa

SEQ ID NO: 815394 - DNA, 19 bp, Mus musculus
  siRNA target sequence for BC034086 (NM_199012.1,719-737).
cgaagcaaagtctaaactt

SEQ ID NO: 815395 - DNA, 19 bp, Mus musculus
  siRNA target sequence for BC034086 (NM_199012.1,720-738).
gaagcaaagtctaaactta

SEQ ID NO: 815396 - DNA, 19 bp, Mus musculus
  siRNA target sequence for BC034086 (NM_199012.1,724-742).
caaagtctaaacttagtct

SEQ ID NO: 815397 - DNA, 19 bp, Mus musculus
  siRNA target sequence for BC034086 (NM_199012.1,728-746).
gtctaaacttagtcttttt

SEQ ID NO: 815398 - DNA, 19 bp, Mus musculus
  siRNA target sequence for BC034086 (NM_199012.1,730-748).
ctaaacttagtctttttca

SEQ ID NO: 815399 - DNA, 19 bp, Mus musculus
  siRNA target sequence for BC034086 (NM_199012.1,735-753).
cttagtctttttcaatcaa

SEQ ID NO: 815400 - DNA, 19 bp, Mus musculus
  siRNA target sequence for BC034086 (NM_199012.1,751-769).
caagaatcagtttacagaa

SEQ ID NO: 815401 - DNA, 19 bp, Mus musculus
  siRNA target sequence for BC034086 (NM_199012.1,767-785).
gaaagcaagtgtgaagtta

SEQ ID NO: 815402 - DNA, 19 bp, Mus musculus
  siRNA target sequence for BC034086 (NM_199012.1,870-888).
caggaccgctactatcaaa

SEQ ID NO: 815403 - DNA, 19 bp, Mus musculus
  siRNA target sequence for BC034086 (NM_199012.1,872-890).
ggaccgctactatcaaaca

SEQ ID NO: 815404 - DNA, 19 bp, Mus musculus
  siRNA target sequence for BC034086 (NM_199012.1,881-899).
ctatcaaacagacttagtt

SEQ ID NO: 815405 - DNA, 19 bp, Mus musculus
  siRNA target sequence for BC034086 (NM_199012.1,885-903).
caaacagacttagttaaca

SEQ ID NO: 815406 - DNA, 19 bp, Mus musculus
  siRNA target sequence for BC034086 (NM_199012.1,889-907).
cagacttagttaacatcat

SEQ ID NO: 815407 - DNA, 19 bp, Mus musculus
  siRNA target sequence for BC034086 (NM_199012.1,891-909).
gacttagttaacatcatga

SEQ ID NO: 815408 - DNA, 19 bp, Mus musculus
  siRNA target sequence for BC034086 (NM_199012.1,933-951).
gaccacctcaaggattatt

SEQ ID NO: 815409 - DNA, 19 bp, Mus musculus
  siRNA target sequence for BC034086 (NM_199012.1,935-953).
ccacctcaaggattattta

SEQ ID NO: 815410 - DNA, 19 bp, Mus musculus
  siRNA target sequence for BC034086 (NM_199012.1,936-954).
cacctcaaggattatttaa

SEQ ID NO: 815411 - DNA, 19 bp, Mus musculus
  siRNA target sequence for BC034086 (NM_199012.1,938-956).
cctcaaggattatttaata

SEQ ID NO: 815412 - DNA, 19 bp, Mus musculus
  siRNA target sequence for BC034086 (NM_199012.1,965-983).
ccggaccgagctagaaact

SEQ ID NO: 815413 - DNA, 19 bp, Mus musculus
  siRNA target sequence for BC034086 (NM_199012.1,966-984).
cggaccgagctagaaactt

SEQ ID NO: 815414 - DNA, 19 bp, Mus musculus
  siRNA target sequence for BC034086 (NM_199012.1,982-1000).
cttgccaagctatacagaa

SEQ ID NO: 815415 - DNA, 19 bp, Mus musculus
  siRNA target sequence for BC034086 (NM_199012.1,1037-1055).
ggtacgggactataacctt

SEQ ID NO: 815416 - DNA, 19 bp, Mus musculus
  siRNA target sequence for BC034086 (NM_199012.1,1110-1128).
cagccttgtgacagtgata

SEQ ID NO: 815417 - DNA, 19 bp, Mus musculus
  siRNA target sequence for BC034086 (NM_199012.1,1112-1130).
gccttgtgacagtgatact

SEQ ID NO: 815418 - DNA, 19 bp, Mus musculus
  siRNA target sequence for BC034086 (NM_199012.1,1117-1135).
gtgacagtgatactagttt

SEQ ID NO: 815419 - DNA, 19 bp, Mus musculus
  siRNA target sequence for BC034086 (NM_199012.1,1119-1137).
gacagtgatactagtttaa

SEQ ID NO: 815420 - DNA, 19 bp, Mus musculus
  siRNA target sequence for BC034086 (NM_199012.1,1121-1139).
cagtgatactagtttaaaa

SEQ ID NO: 815421 - DNA, 19 bp, Mus musculus
  siRNA target sequence for BC034086 (NM_199012.1,1144-1162).
cccaactggtggatattga

SEQ ID NO: 815422 - DNA, 19 bp, Mus musculus
  siRNA target sequence for BC034086 (NM_199012.1,1198-1216).
ctgagagtcgacaattaga

SEQ ID NO: 815423 - DNA, 19 bp, Mus musculus
  siRNA target sequence for BC034086 (NM_199012.1,1200-1218).
gagagtcgacaattagaat

SEQ ID NO: 815424 - DNA, 19 bp, Mus musculus
  siRNA target sequence for BC034086 (NM_199012.1,1202-1220).
gagtcgacaattagaatca

SEQ ID NO: 815425 - DNA, 19 bp, Mus musculus
  siRNA target sequence for BC034086 (NM_199012.1,1204-1222).
gtcgacaattagaatcaga

SEQ ID NO: 815426 - DNA, 19 bp, Mus musculus
  siRNA target sequence for BC034086 (NM_199012.1,1206-1224).
cgacaattagaatcagaaa

SEQ ID NO: 815427 - DNA, 19 bp, Mus musculus
  siRNA target sequence for BC034086 (NM_199012.1,1281-1299).
gtggcacgtgagcacaaaa

SEQ ID NO: 815428 - DNA, 19 bp, Mus musculus
  siRNA target sequence for BC034086 (NM_199012.1,1283-1301).
ggcacgtgagcacaaaaat

SEQ ID NO: 815429 - DNA, 19 bp, Mus musculus
  siRNA target sequence for BC034086 (NM_199012.1,1284-1302).
gcacgtgagcacaaaaata

SEQ ID NO: 815430 - DNA, 19 bp, Mus musculus
  siRNA target sequence for BC034086 (NM_199012.1,1292-1310).
gcacaaaaatattgttcat

SEQ ID NO: 815431 - DNA, 19 bp, Mus musculus
  siRNA target sequence for BC034086 (NM_199012.1,1308-1326).
catcagcagcgggttctaa

SEQ ID NO: 815432 - DNA, 19 bp, Mus musculus
  siRNA target sequence for BC034086 (NM_199012.1,1313-1331).
gcagcgggttctaaatgaa

SEQ ID NO: 815433 - DNA, 19 bp, Mus musculus
  siRNA target sequence for BC034086 (NM_199012.1,1316-1334).
gcgggttctaaatgaacta

SEQ ID NO: 815434 - DNA, 19 bp, Mus musculus
  siRNA target sequence for BC034086 (NM_199012.1,1318-1336).
gggttctaaatgaactaga

SEQ ID NO: 815435 - DNA, 19 bp, Mus musculus
  siRNA target sequence for BC034086 (NM_199012.1,1320-1338).
gttctaaatgaactagaat

SEQ ID NO: 815436 - DNA, 19 bp, Mus musculus
  siRNA target sequence for BC034086 (NM_199012.1,1412-1430).
ccgtaaagcagagatcatt

SEQ ID NO: 815437 - DNA, 19 bp, Mus musculus
  siRNA target sequence for BC034086 (NM_199012.1,1413-1431).
cgtaaagcagagatcatta

SEQ ID NO: 815438 - DNA, 19 bp, Mus musculus
  siRNA target sequence for BC034086 (NM_199012.1,1466-1484).
gcagattggggtttctgta

SEQ ID NO: 815439 - DNA, 19 bp, Mus musculus
  siRNA target sequence for BC034086 (NM_199012.1,1480-1498).
ctgtagatacgtggttaaa

SEQ ID NO: 815440 - DNA, 19 bp, Mus musculus
  siRNA target sequence for BC034086 (NM_199012.1,1482-1500).
gtagatacgtggttaaaga

SEQ ID NO: 815441 - DNA, 19 bp, Mus musculus
  siRNA target sequence for BC034086 (NM_199012.1,1574-1592).
cactctacactcgcttaat

SEQ ID NO: 815442 - DNA, 19 bp, Mus musculus
  siRNA target sequence for BC034086 (NM_199012.1,1669-1687).
ctggcaccttgagaaatta

SEQ ID NO: 815443 - DNA, 19 bp, Mus musculus
  siRNA target sequence for BC034086 (NM_199012.1,1699-1717).
gcaaagttgtttattccta

SEQ ID NO: 815444 - DNA, 19 bp, Mus musculus
  siRNA target sequence for BC034086 (NM_199012.1,1700-1718).
caaagttgtttattcctat

SEQ ID NO: 815445 - DNA, 19 bp, Mus musculus
  siRNA target sequence for BC034086 (NM_199012.1,1760-1778).
ggtgttagaagtgattgaa

SEQ ID NO: 815446 - DNA, 19 bp, Mus musculus
  siRNA target sequence for BC034086 (NM_199012.1,1796-1814).
ctgggtaaaggctcgaaat

SEQ ID NO: 815447 - DNA, 19 bp, Mus musculus
  siRNA target sequence for BC034086 (NM_199012.1,1798-1816).
gggtaaaggctcgaaataa

SEQ ID NO: 815448 - DNA, 19 bp, Mus musculus
  siRNA target sequence for BC034086 (NM_199012.1,1799-1817).
ggtaaaggctcgaaataaa

SEQ ID NO: 815449 - DNA, 19 bp, Mus musculus
  siRNA target sequence for BC034086 (NM_199012.1,1839-1857).
ccagaaaagtacctacaat

SEQ ID NO: 815450 - DNA, 19 bp, Mus musculus
  siRNA target sequence for BC034086 (NM_199012.1,1840-1858).
cagaaaagtacctacaatt

SEQ ID NO: 815451 - DNA, 19 bp, Mus musculus
  siRNA target sequence for BC034086 (NM_199012.1,2052-2070).
gcaattattcgcatcttga

SEQ ID NO: 815452 - DNA, 19 bp, Mus musculus
  siRNA target sequence for BC034086 (NM_199012.1,2053-2071).
caattattcgcatcttgaa

SEQ ID NO: 815453 - DNA, 19 bp, Mus musculus
  siRNA target sequence for BC034086 (NM_199012.1,2061-2079).
cgcatcttgaacaaagaaa

SEQ ID NO: 815454 - DNA, 19 bp, Mus musculus
  siRNA target sequence for BC034086 (NM_199012.1,2116-2134).
gtggtcgaatcggtgtttt

SEQ ID NO: 815455 - DNA, 19 bp, Mus musculus
  siRNA target sequence for BC034086 (NM_199012.1,2237-2255).
gcctccactgcctctgtat

SEQ ID NO: 815456 - DNA, 19 bp, Mus musculus
  siRNA target sequence for BC034086 (NM_199012.1,2339-2357).
cagccttcatgctgaatca

SEQ ID NO: 815457 - DNA, 19 bp, Mus musculus
  siRNA target sequence for D14Ertd668e (NM_199015.1,277-295).
gactcttgatctacgtaat

SEQ ID NO: 815458 - DNA, 19 bp, Mus musculus
  siRNA target sequence for D14Ertd668e (NM_199015.1,396-414).
gtgatttatggttctgtaa

SEQ ID NO: 815459 - DNA, 19 bp, Mus musculus
  siRNA target sequence for D14Ertd668e (NM_199015.1,405-423).
ggttctgtaagaagagtta

SEQ ID NO: 815460 - DNA, 19 bp, Mus musculus
  siRNA target sequence for D14Ertd668e (NM_199015.1,599-617).
cctgcacagccaaaaacga

SEQ ID NO: 815461 - DNA, 19 bp, Mus musculus
  siRNA target sequence for D14Ertd668e (NM_199015.1,605-623).
cagccaaaaacgatgaaat

SEQ ID NO: 815462 - DNA, 19 bp, Mus musculus
  siRNA target sequence for D14Ertd668e (NM_199015.1,607-625).
gccaaaaacgatgaaatgt

SEQ ID NO: 815463 - DNA, 19 bp, Mus musculus
  siRNA target sequence for D14Ertd668e (NM_199015.1,608-626).
ccaaaaacgatgaaatgta

SEQ ID NO: 815464 - DNA, 19 bp, Mus musculus
  siRNA target sequence for D14Ertd668e (NM_199015.1,624-642).
gtagtaacgccaaaagaca

SEQ ID NO: 815465 - DNA, 19 bp, Mus musculus
  siRNA target sequence for D14Ertd668e (NM_199015.1,627-645).
gtaacgccaaaagacatat

SEQ ID NO: 815466 - DNA, 19 bp, Mus musculus
  siRNA target sequence for D14Ertd668e (NM_199015.1,631-649).
cgccaaaagacatatgaca

SEQ ID NO: 815467 - DNA, 19 bp, Mus musculus
  siRNA target sequence for D14Ertd668e (NM_199015.1,662-680).
ggtcacacagtaatcaaga

SEQ ID NO: 815468 - DNA, 19 bp, Mus musculus
  siRNA target sequence for D14Ertd668e (NM_199015.1,665-683).
cacacagtaatcaagagta

SEQ ID NO: 815469 - DNA, 19 bp, Mus musculus
  siRNA target sequence for Enpp4 (NM_199016.1,178-196).
gacttgtcactggctataa

SEQ ID NO: 815470 - DNA, 19 bp, Mus musculus
  siRNA target sequence for Enpp4 (NM_199016.1,189-207).
ggctataaagggaactctt

SEQ ID NO: 815471 - DNA, 19 bp, Mus musculus
  siRNA target sequence for Enpp4 (NM_199016.1,215-233).
ctcagcacctcggttactt

SEQ ID NO: 815472 - DNA, 19 bp, Mus musculus
  siRNA target sequence for Enpp4 (NM_199016.1,217-235).
cagcacctcggttacttct

SEQ ID NO: 815473 - DNA, 19 bp, Mus musculus
  siRNA target sequence for Enpp4 (NM_199016.1,290-308).
cctccagaactttatcaaa

SEQ ID NO: 815474 - DNA, 19 bp, Mus musculus
  siRNA target sequence for Enpp4 (NM_199016.1,374-392).
cattgtgacgggcttatat

SEQ ID NO: 815475 - DNA, 19 bp, Mus musculus
  siRNA target sequence for Enpp4 (NM_199016.1,465-483).
gataaggatccgttttggt

SEQ ID NO: 815476 - DNA, 19 bp, Mus musculus
  siRNA target sequence for Enpp4 (NM_199016.1,564-582).
gatgtgcccattcacaata

SEQ ID NO: 815477 - DNA, 19 bp, Mus musculus
  siRNA target sequence for Enpp4 (NM_199016.1,567-585).
gtgcccattcacaatatca

SEQ ID NO: 815478 - DNA, 19 bp, Mus musculus
  siRNA target sequence for Enpp4 (NM_199016.1,569-587).
gcccattcacaatatcaca

SEQ ID NO: 815479 - DNA, 19 bp, Mus musculus
  siRNA target sequence for Enpp4 (NM_199016.1,610-628).
gcagctccgtgtcctttaa

SEQ ID NO: 815480 - DNA, 19 bp, Mus musculus
  siRNA target sequence for Enpp4 (NM_199016.1,614-632).
ctccgtgtcctttaaggaa

SEQ ID NO: 815481 - DNA, 19 bp, Mus musculus
  siRNA target sequence for Enpp4 (NM_199016.1,629-647).
ggaaagactgggtaacgtt

SEQ ID NO: 815482 - DNA, 19 bp, Mus musculus
  siRNA target sequence for Enpp4 (NM_199016.1,630-648).
gaaagactgggtaacgtta

SEQ ID NO: 815483 - DNA, 19 bp, Mus musculus
  siRNA target sequence for Enpp4 (NM_199016.1,728-746).
gtatgggcctgaagataaa

SEQ ID NO: 815484 - DNA, 19 bp, Mus musculus
  siRNA target sequence for Enpp4 (NM_199016.1,790-808).
gtgatattgtcctaaagct

SEQ ID NO: 815485 - DNA, 19 bp, Mus musculus
  siRNA target sequence for Enpp4 (NM_199016.1,826-844).
gggacagccttaatgtgat

SEQ ID NO: 815486 - DNA, 19 bp, Mus musculus
  siRNA target sequence for Enpp4 (NM_199016.1,884-902).
cagactgatagatttggat

SEQ ID NO: 815487 - DNA, 19 bp, Mus musculus
  siRNA target sequence for Enpp4 (NM_199016.1,904-922).
cctgcatcgaccgttcaaa

SEQ ID NO: 815488 - DNA, 19 bp, Mus musculus
  siRNA target sequence for Enpp4 (NM_199016.1,907-925).
gcatcgaccgttcaaacta

SEQ ID NO: 815489 - DNA, 19 bp, Mus musculus
  siRNA target sequence for Enpp4 (NM_199016.1,915-933).
cgttcaaactacagtgtta

SEQ ID NO: 815490 - DNA, 19 bp, Mus musculus
  siRNA target sequence for Enpp4 (NM_199016.1,944-962).
ccctgtggctgcgattctt

SEQ ID NO: 815491 - DNA, 19 bp, Mus musculus
  siRNA target sequence for Enpp4 (NM_199016.1,952-970).
ctgcgattcttcccaaaat

SEQ ID NO: 815492 - DNA, 19 bp, Mus musculus
  siRNA target sequence for Enpp4 (NM_199016.1,954-972).
gcgattcttcccaaaataa

SEQ ID NO: 815493 - DNA, 19 bp, Mus musculus
  siRNA target sequence for Enpp4 (NM_199016.1,1003-1021).
gctgtaaccctcacatgaa

SEQ ID NO: 815494 - DNA, 19 bp, Mus musculus
  siRNA target sequence for Enpp4 (NM_199016.1,1006-1024).
gtaaccctcacatgaatgt

SEQ ID NO: 815495 - DNA, 19 bp, Mus musculus
  siRNA target sequence for Enpp4 (NM_199016.1,1035-1053).
gaagctatccctaacagat

SEQ ID NO: 815496 - DNA, 19 bp, Mus musculus
  siRNA target sequence for Enpp4 (NM_199016.1,1038-1056).
gctatccctaacagatttt

SEQ ID NO: 815497 - DNA, 19 bp, Mus musculus
  siRNA target sequence for Enpp4 (NM_199016.1,1039-1057).
ctatccctaacagatttta

SEQ ID NO: 815498 - DNA, 19 bp, Mus musculus
  siRNA target sequence for Enpp4 (NM_199016.1,1061-1079).
ccaacacagcagtcgaatt

SEQ ID NO: 815499 - DNA, 19 bp, Mus musculus
  siRNA target sequence for Enpp4 (NM_199016.1,1072-1090).
gtcgaattcagcccattat

SEQ ID NO: 815500 - DNA, 19 bp, Mus musculus
  siRNA target sequence for Enpp4 (NM_199016.1,1074-1092).
cgaattcagcccattattt

SEQ ID NO: 815501 - DNA, 19 bp, Mus musculus
  siRNA target sequence for Enpp4 (NM_199016.1,1149-1167).
gaccatggctatgataatt

SEQ ID NO: 815502 - DNA, 19 bp, Mus musculus
  siRNA target sequence for Enpp4 (NM_199016.1,1206-1224).
cctgcctttagaaaaggtt

SEQ ID NO: 815503 - DNA, 19 bp, Mus musculus
  siRNA target sequence for Enpp4 (NM_199016.1,1241-1259).
caacactgtggatatttat

SEQ ID NO: 815504 - DNA, 19 bp, Mus musculus
  siRNA target sequence for Enpp4 (NM_199016.1,1246-1264).
ctgtggatatttatccaat

SEQ ID NO: 815505 - DNA, 19 bp, Mus musculus
  siRNA target sequence for Enpp4 (NM_199016.1,1335-1353).
gtggaccagtggtgcatta

SEQ ID NO: 815506 - DNA, 19 bp, Mus musculus
  siRNA target sequence for Enpp4 (NM_199016.1,1337-1355).
ggaccagtggtgcattaat

SEQ ID NO: 815507 - DNA, 19 bp, Mus musculus
  siRNA target sequence for Enpp4 (NM_199016.1,1365-1383).
gccattggaattgttgtta

SEQ ID NO: 815508 - DNA, 19 bp, Mus musculus
  siRNA target sequence for Enpp4 (NM_199016.1,1380-1398).
gttagtgcactattggtat

SEQ ID NO: 815509 - DNA, 19 bp, Mus musculus
  siRNA target sequence for Enpp4 (NM_199016.1,1387-1405).
cactattggtattaaccat

SEQ ID NO: 815510 - DNA, 19 bp, Mus musculus
  siRNA target sequence for Enpp4 (NM_199016.1,1406-1424).
gctaacaggcctcatgata

SEQ ID NO: 815511 - DNA, 19 bp, Mus musculus
  siRNA target sequence for Enpp4 (NM_199016.1,1407-1425).
ctaacaggcctcatgatat

SEQ ID NO: 815512 - DNA, 19 bp, Mus musculus
  siRNA target sequence for Enpp4 (NM_199016.1,1487-1505).
cgatgaccctttaattgat

SEQ ID NO: 815513 - DNA, 19 bp, Mus musculus
  siRNA target sequence for Enpp4 (NM_199016.1,1488-1506).
gatgaccctttaattgatt

SEQ ID NO: 815514 - DNA, 19 bp, Mus musculus
  siRNA target sequence for LOC234912 (NM_199017.1,67-85).
gatggaggcggctactact

SEQ ID NO: 815515 - DNA, 19 bp, Mus musculus
  siRNA target sequence for LOC234912 (NM_199017.1,73-91).
ggcggctactacttcagat

SEQ ID NO: 815516 - DNA, 19 bp, Mus musculus
  siRNA target sequence for LOC234912 (NM_199017.1,74-92).
gcggctactacttcagatt

SEQ ID NO: 815517 - DNA, 19 bp, Mus musculus
  siRNA target sequence for LOC234912 (NM_199017.1,203-221).
cgttccagccctaccaaaa

SEQ ID NO: 815518 - DNA, 19 bp, Mus musculus
  siRNA target sequence for LOC234912 (NM_199017.1,211-229).
ccctaccaaaaggatgatt

SEQ ID NO: 815519 - DNA, 19 bp, Mus musculus
  siRNA target sequence for LOC234912 (NM_199017.1,212-230).
cctaccaaaaggatgattt

SEQ ID NO: 815520 - DNA, 19 bp, Mus musculus
  siRNA target sequence for LOC234912 (NM_199017.1,213-231).
ctaccaaaaggatgatttt

SEQ ID NO: 815521 - DNA, 19 bp, Mus musculus
  siRNA target sequence for LOC234912 (NM_199017.1,250-268).
gacccaaatgttattccaa

SEQ ID NO: 815522 - DNA, 19 bp, Mus musculus
  siRNA target sequence for LOC234912 (NM_199017.1,252-270).
cccaaatgttattccaaat

SEQ ID NO: 815523 - DNA, 19 bp, Mus musculus
  siRNA target sequence for LOC234912 (NM_199017.1,273-291).
gcagttactctcagattct

SEQ ID NO: 815524 - DNA, 19 bp, Mus musculus
  siRNA target sequence for LOC234912 (NM_199017.1,274-292).
cagttactctcagattctt

SEQ ID NO: 815525 - DNA, 19 bp, Mus musculus
  siRNA target sequence for LOC234912 (NM_199017.1,276-294).
gttactctcagattcttct

SEQ ID NO: 815526 - DNA, 19 bp, Mus musculus
  siRNA target sequence for LOC234912 (NM_199017.1,308-326).
cattaggatctgaagtgaa

SEQ ID NO: 815527 - DNA, 19 bp, Mus musculus
  siRNA target sequence for LOC234912 (NM_199017.1,314-332).
gatctgaagtgaaaaaaat

SEQ ID NO: 815528 - DNA, 19 bp, Mus musculus
  siRNA target sequence for LOC234912 (NM_199017.1,350-368).
catgcacacaactttcaat

SEQ ID NO: 815529 - DNA, 19 bp, Mus musculus
  siRNA target sequence for LOC234912 (NM_199017.1,354-372).
cacacaactttcaatgtca

SEQ ID NO: 815530 - DNA, 19 bp, Mus musculus
  siRNA target sequence for LOC234912 (NM_199017.1,356-374).
cacaactttcaatgtcatt

SEQ ID NO: 815531 - DNA, 19 bp, Mus musculus
  siRNA target sequence for LOC234912 (NM_199017.1,358-376).
caactttcaatgtcatttt

SEQ ID NO: 815532 - DNA, 19 bp, Mus musculus
  siRNA target sequence for LOC234912 (NM_199017.1,371-389).
catttttccaacgcttata

SEQ ID NO: 815533 - DNA, 19 bp, Mus musculus
  siRNA target sequence for LOC234912 (NM_199017.1,379-397).
caacgcttatacgatgaaa

SEQ ID NO: 815534 - DNA, 19 bp, Mus musculus
  siRNA target sequence for LOC234912 (NM_199017.1,464-482).
cagacgaactgagaaaagt

SEQ ID NO: 815535 - DNA, 19 bp, Mus musculus
  siRNA target sequence for LOC234912 (NM_199017.1,466-484).
gacgaactgagaaaagttt

SEQ ID NO: 815536 - DNA, 19 bp, Mus musculus
  siRNA target sequence for LOC234912 (NM_199017.1,578-596).
ggtccctttgtcagtatga

SEQ ID NO: 815537 - DNA, 19 bp, Mus musculus
  siRNA target sequence for LOC234912 (NM_199017.1,626-644).
ctaagctgatctataagga

SEQ ID NO: 815538 - DNA, 19 bp, Mus musculus
  siRNA target sequence for LOC234912 (NM_199017.1,648-666).
ggtgagtgttcggaaacat

SEQ ID NO: 815539 - DNA, 19 bp, Mus musculus
  siRNA target sequence for LOC234912 (NM_199017.1,664-682).
catcctcgaaccaaggaaa

SEQ ID NO: 815540 - DNA, 19 bp, Mus musculus
  siRNA target sequence for LOC234912 (NM_199017.1,668-686).
ctcgaaccaaggaaataca

SEQ ID NO: 815541 - DNA, 19 bp, Mus musculus
  siRNA target sequence for LOC234912 (NM_199017.1,735-753).
gtgctacccttcacctaaa

SEQ ID NO: 815542 - DNA, 19 bp, Mus musculus
  siRNA target sequence for LOC234912 (NM_199017.1,737-755).
gctacccttcacctaaaga

SEQ ID NO: 815543 - DNA, 19 bp, Mus musculus
  siRNA target sequence for LOC234912 (NM_199017.1,760-778).
gagcagacattctcgtatt

SEQ ID NO: 815544 - DNA, 19 bp, Mus musculus
  siRNA target sequence for LOC234912 (NM_199017.1,762-780).
gcagacattctcgtatttt

SEQ ID NO: 815545 - DNA, 19 bp, Mus musculus
  siRNA target sequence for LOC234912 (NM_199017.1,765-783).
gacattctcgtattttgtt

SEQ ID NO: 815546 - DNA, 19 bp, Mus musculus
  siRNA target sequence for LOC234912 (NM_199017.1,767-785).
cattctcgtattttgttgt

SEQ ID NO: 815547 - DNA, 19 bp, Mus musculus
  siRNA target sequence for LOC234912 (NM_199017.1,792-810).
catcaagcgtcatgtgaat

SEQ ID NO: 815548 - DNA, 19 bp, Mus musculus
  siRNA target sequence for Stard8 (NM_199018.1,369-387).
gagcaatgcaccattagca

SEQ ID NO: 815549 - DNA, 19 bp, Mus musculus
  siRNA target sequence for Stard8 (NM_199018.1,629-647).
ggagggttcccaagacaaa

SEQ ID NO: 815550 - DNA, 19 bp, Mus musculus
  siRNA target sequence for Stard8 (NM_199018.1,674-692).
cctcaagcaccttgaatct

SEQ ID NO: 815551 - DNA, 19 bp, Mus musculus
  siRNA target sequence for Stard8 (NM_199018.1,761-779).
ggccaccaaagcttcatct

SEQ ID NO: 815552 - DNA, 19 bp, Mus musculus
  siRNA target sequence for Stard8 (NM_199018.1,762-780).
gccaccaaagcttcatctt

SEQ ID NO: 815553 - DNA, 19 bp, Mus musculus
  siRNA target sequence for Stard8 (NM_199018.1,981-999).
cgttctctgtccattgaga

SEQ ID NO: 815554 - DNA, 19 bp, Mus musculus
  siRNA target sequence for Stard8 (NM_199018.1,1029-1047).
gcagattggcagtcaagta

SEQ ID NO: 815555 - DNA, 19 bp, Mus musculus
  siRNA target sequence for Stard8 (NM_199018.1,1102-1120).
ccagcacttacgacaactt

SEQ ID NO: 815556 - DNA, 19 bp, Mus musculus
  siRNA target sequence for Stard8 (NM_199018.1,1187-1205).
cagctatgcccatctagat

SEQ ID NO: 815557 - DNA, 19 bp, Mus musculus
  siRNA target sequence for Stard8 (NM_199018.1,1189-1207).
gctatgcccatctagatga

SEQ ID NO: 815558 - DNA, 19 bp, Mus musculus
  siRNA target sequence for Stard8 (NM_199018.1,1468-1486).
caaatgtggtcgaaccatt

SEQ ID NO: 815559 - DNA, 19 bp, Mus musculus
  siRNA target sequence for Stard8 (NM_199018.1,1513-1531).
ctcaggcccaggatcttga

SEQ ID NO: 815560 - DNA, 19 bp, Mus musculus
  siRNA target sequence for Stard8 (NM_199018.1,1970-1988).
ccggggacaccatgtattt

SEQ ID NO: 815561 - DNA, 19 bp, Mus musculus
  siRNA target sequence for Stard8 (NM_199018.1,2129-2147).
gagcctacgccaaatgaat

SEQ ID NO: 815562 - DNA, 19 bp, Mus musculus
  siRNA target sequence for Stard8 (NM_199018.1,2131-2149).
gcctacgccaaatgaatga

SEQ ID NO: 815563 - DNA, 19 bp, Mus musculus
  siRNA target sequence for Stard8 (NM_199018.1,2189-2207).
ctatgatgtggctgattta

SEQ ID NO: 815564 - DNA, 19 bp, Mus musculus
  siRNA target sequence for Stard8 (NM_199018.1,2202-2220).
gatttactgaagcagtatt

SEQ ID NO: 815565 - DNA, 19 bp, Mus musculus
  siRNA target sequence for Stard8 (NM_199018.1,2260-2278).
ccactactttcctacaaat

SEQ ID NO: 815566 - DNA, 19 bp, Mus musculus
  siRNA target sequence for Stard8 (NM_199018.1,2266-2284).
ctttcctacaaatctatca

SEQ ID NO: 815567 - DNA, 19 bp, Mus musculus
  siRNA target sequence for Stard8 (NM_199018.1,2452-2470).
ccatcttccacctcaatgt

SEQ ID NO: 815568 - DNA, 19 bp, Mus musculus
  siRNA target sequence for Stard8 (NM_199018.1,2590-2608).
gtgactgcaagaaactttt

SEQ ID NO: 815569 - DNA, 19 bp, Mus musculus
  siRNA target sequence for Stard8 (NM_199018.1,2709-2727).
gcggctggggtgagtctaa

SEQ ID NO: 815570 - DNA, 19 bp, Mus musculus
  siRNA target sequence for Stard8 (NM_199018.1,2718-2736).
gtgagtctaagcctttaca

SEQ ID NO: 815571 - DNA, 19 bp, Mus musculus
  siRNA target sequence for Stard8 (NM_199018.1,3195-3213).
cgctctcgcctcactcata

SEQ ID NO: 815572 - DNA, 19 bp, Mus musculus
  siRNA target sequence for Stard8 (NM_199018.1,3196-3214).
gctctcgcctcactcatat

SEQ ID NO: 815573 - DNA, 19 bp, Mus musculus
  siRNA target sequence for Stard8 (NM_199018.1,3241-3259).
ctcctgactggtacaacaa

SEQ ID NO: 815574 - DNA, 19 bp, Mus musculus
  siRNA target sequence for Stard8 (NM_199018.1,3244-3262).
ctgactggtacaacaaagt

SEQ ID NO: 815575 - DNA, 19 bp, Mus musculus
  siRNA target sequence for Stard8 (NM_199018.1,3248-3266).
ctggtacaacaaagtcttt

SEQ ID NO: 815576 - DNA, 19 bp, Mus musculus
  siRNA target sequence for LOC237958 (NM_199019.1,147-165).
gtccgagtcgtgtcaaaga

SEQ ID NO: 815577 - DNA, 19 bp, Mus musculus
  siRNA target sequence for LOC237958 (NM_199019.1,150-168).
cgagtcgtgtcaaagaact

SEQ ID NO: 815578 - DNA, 19 bp, Mus musculus
  siRNA target sequence for LOC237958 (NM_199019.1,330-348).
cccctgcaccagactacta

SEQ ID NO: 815579 - DNA, 19 bp, Mus musculus
  siRNA target sequence for LOC237958 (NM_199019.1,354-372).
gtcacgcgtggcaactgta

SEQ ID NO: 815580 - DNA, 19 bp, Mus musculus
  siRNA target sequence for LOC237958 (NM_199019.1,414-432).
caggggttgctcattgtga

SEQ ID NO: 815581 - DNA, 19 bp, Mus musculus
  siRNA target sequence for LOC237958 (NM_199019.1,454-472).
gttcagacaccatctcaaa

SEQ ID NO: 815582 - DNA, 19 bp, Mus musculus
  siRNA target sequence for LOC237958 (NM_199019.1,606-624).
gagcctgttactgactata

SEQ ID NO: 815583 - DNA, 19 bp, Mus musculus
  siRNA target sequence for LOC237958 (NM_199019.1,609-627).
cctgttactgactataaca

SEQ ID NO: 815584 - DNA, 19 bp, Mus musculus
  siRNA target sequence for LOC237958 (NM_199019.1,610-628).
ctgttactgactataacat

SEQ ID NO: 815585 - DNA, 19 bp, Mus musculus
  siRNA target sequence for LOC237958 (NM_199019.1,685-703).
gtttgatggaggcaaacaa

SEQ ID NO: 815586 - DNA, 19 bp, Mus musculus
  siRNA target sequence for LOC237958 (NM_199019.1,737-755).
gcttggtggtcacaatcaa

SEQ ID NO: 815587 - DNA, 19 bp, Mus musculus
  siRNA target sequence for LOC237958 (NM_199019.1,904-922).
gctttgtctacgtcatgat

SEQ ID NO: 815588 - DNA, 19 bp, Mus musculus
  siRNA target sequence for LOC237958 (NM_199019.1,914-932).
cgtcatgattgggatcttt

SEQ ID NO: 815589 - DNA, 19 bp, Mus musculus
  siRNA target sequence for LOC237958 (NM_199019.1,915-933).
gtcatgattgggatcttta

SEQ ID NO: 815590 - DNA, 19 bp, Mus musculus
  siRNA target sequence for LOC237958 (NM_199019.1,1023-1041).
caacgggtttctgtaacat

SEQ ID NO: 815591 - DNA, 19 bp, Mus musculus
  siRNA target sequence for LOC237958 (NM_199019.1,1033-1051).
ctgtaacatggccattact

SEQ ID NO: 815592 - DNA, 19 bp, Mus musculus
  siRNA target sequence for LOC237958 (NM_199019.1,1090-1108).
gggtcatccaccgaaatga

SEQ ID NO: 815593 - DNA, 19 bp, Mus musculus
  siRNA target sequence for LOC237958 (NM_199019.1,1179-1197).
cggctgcccacgttcaaga

SEQ ID NO: 815594 - DNA, 19 bp, Mus musculus
  siRNA target sequence for LOC237958 (NM_199019.1,1180-1198).
ggctgcccacgttcaagaa

SEQ ID NO: 815595 - DNA, 19 bp, Mus musculus
  siRNA target sequence for LOC237958 (NM_199019.1,1480-1498).
ctcgccaggtctactatat

SEQ ID NO: 815596 - DNA, 19 bp, Mus musculus
  siRNA target sequence for MGC67168 (NM_199020.1,483-501).
cggattccagagtgtatca

SEQ ID NO: 815597 - DNA, 19 bp, Mus musculus
  siRNA target sequence for MGC67168 (NM_199020.1,484-502).
ggattccagagtgtatcat

SEQ ID NO: 815598 - DNA, 19 bp, Mus musculus
  siRNA target sequence for MGC67168 (NM_199020.1,489-507).
ccagagtgtatcattcgta

SEQ ID NO: 815599 - DNA, 19 bp, Mus musculus
  siRNA target sequence for MGC67168 (NM_199020.1,508-526).
gagacacgcctcctgaaat

SEQ ID NO: 815600 - DNA, 19 bp, Mus musculus
  siRNA target sequence for MGC67168 (NM_199020.1,510-528).
gacacgcctcctgaaatat

SEQ ID NO: 815601 - DNA, 19 bp, Mus musculus
  siRNA target sequence for MGC67168 (NM_199020.1,514-532).
cgcctcctgaaatatcagt

SEQ ID NO: 815602 - DNA, 19 bp, Mus musculus
  siRNA target sequence for MGC67168 (NM_199020.1,553-571).
ctagagacatccttgttca

SEQ ID NO: 815603 - DNA, 19 bp, Mus musculus
  siRNA target sequence for MGC67168 (NM_199020.1,585-603).
gtgcacctcagatgtgaaa

SEQ ID NO: 815604 - DNA, 19 bp, Mus musculus
  siRNA target sequence for MGC67168 (NM_199020.1,622-640).
ggtctcaggaatatgtgaa

SEQ ID NO: 815605 - DNA, 19 bp, Mus musculus
  siRNA target sequence for MGC67168 (NM_199020.1,627-645).
caggaatatgtgaagtgtt

SEQ ID NO: 815606 - DNA, 19 bp, Mus musculus
  siRNA target sequence for MGC67168 (NM_199020.1,636-654).
gtgaagtgttgcaaagagt

SEQ ID NO: 815607 - DNA, 19 bp, Mus musculus
  siRNA target sequence for MGC67168 (NM_199020.1,647-665).
caaagagtctacttcttct

SEQ ID NO: 815608 - DNA, 19 bp, Mus musculus
  siRNA target sequence for MGC67168 (NM_199020.1,696-714).
cgagagacaccctatcaaa

SEQ ID NO: 815609 - DNA, 19 bp, Mus musculus
  siRNA target sequence for MGC67168 (NM_199020.1,703-721).
caccctatcaaaataagca

SEQ ID NO: 815610 - DNA, 19 bp, Mus musculus
  siRNA target sequence for MGC67168 (NM_199020.1,732-750).
gcctataggagtcttaatt

SEQ ID NO: 815611 - DNA, 19 bp, Mus musculus
  siRNA target sequence for MGC67168 (NM_199020.1,734-752).
ctataggagtcttaattct

SEQ ID NO: 815612 - DNA, 19 bp, Mus musculus
  siRNA target sequence for MGC67168 (NM_199020.1,755-773).
ccggtattgtgagcaaatt

SEQ ID NO: 815613 - DNA, 19 bp, Mus musculus
  siRNA target sequence for MGC67168 (NM_199020.1,817-835).
ccttctggaggtacagtta

SEQ ID NO: 815614 - DNA, 19 bp, Mus musculus
  siRNA target sequence for MGC67168 (NM_199020.1,826-844).
ggtacagttacggtcaaat

SEQ ID NO: 815615 - DNA, 19 bp, Mus musculus
  siRNA target sequence for MGC67168 (NM_199020.1,827-845).
gtacagttacggtcaaata

SEQ ID NO: 815616 - DNA, 19 bp, Mus musculus
  siRNA target sequence for MGC67168 (NM_199020.1,830-848).
cagttacggtcaaatatat

SEQ ID NO: 815617 - DNA, 19 bp, Mus musculus
  siRNA target sequence for MGC67168 (NM_199020.1,832-850).
gttacggtcaaatatatga

SEQ ID NO: 815618 - DNA, 19 bp, Mus musculus
  siRNA target sequence for MGC67168 (NM_199020.1,859-877).
ccattggagaggaaccatt

SEQ ID NO: 815619 - DNA, 19 bp, Mus musculus
  siRNA target sequence for MGC67168 (NM_199020.1,902-920).
cttggttaattctagtcat

SEQ ID NO: 815620 - DNA, 19 bp, Mus musculus
  siRNA target sequence for MGC67168 (NM_199020.1,905-923).
ggttaattctagtcatctt

SEQ ID NO: 815621 - DNA, 19 bp, Mus musculus
  siRNA target sequence for MGC67168 (NM_199020.1,913-931).
ctagtcatcttattaaaca

SEQ ID NO: 815622 - DNA, 19 bp, Mus musculus
  siRNA target sequence for MGC67168 (NM_199020.1,936-954).
gtaattagccctgaagaaa

SEQ ID NO: 815623 - DNA, 19 bp, Mus musculus
  siRNA target sequence for MGC67168 (NM_199020.1,1031-1049).
cggggagaggccatatgta

SEQ ID NO: 815624 - DNA, 19 bp, Mus musculus
  siRNA target sequence for MGC67168 (NM_199020.1,1169-1187).
cggctggtacagtcatgaa

SEQ ID NO: 815625 - DNA, 19 bp, Mus musculus
  siRNA target sequence for MGC67168 (NM_199020.1,1170-1188).
ggctggtacagtcatgaaa

SEQ ID NO: 815626 - DNA, 19 bp, Mus musculus
  siRNA target sequence for MGC67168 (NM_199020.1,1496-1514).
ccagcgcgatgcttgttat

SEQ ID NO: 815627 - DNA, 19 bp, Mus musculus
  siRNA target sequence for MGC67168 (NM_199020.1,1497-1515).
cagcgcgatgcttgttata

SEQ ID NO: 815628 - DNA, 19 bp, Mus musculus
  siRNA target sequence for MGC67168 (NM_199020.1,1499-1517).
gcgcgatgcttgttataat

SEQ ID NO: 815629 - DNA, 19 bp, Mus musculus
  siRNA target sequence for MGC67168 (NM_199020.1,1501-1519).
gcgatgcttgttataatca

SEQ ID NO: 815630 - DNA, 19 bp, Mus musculus
  siRNA target sequence for LOC271849 (NM_199022.1,39-57).
caggactcacgctgtatgt

SEQ ID NO: 815631 - DNA, 19 bp, Mus musculus
  siRNA target sequence for LOC271849 (NM_199022.1,49-67).
gctgtatgtaggactcttt

SEQ ID NO: 815632 - DNA, 19 bp, Mus musculus
  siRNA target sequence for LOC271849 (NM_199022.1,295-313).
ggccaaccccatcactttt

SEQ ID NO: 815633 - DNA, 19 bp, Mus musculus
  siRNA target sequence for LOC271849 (NM_199022.1,403-421).
gtccccagaatccaatcta

SEQ ID NO: 815634 - DNA, 19 bp, Mus musculus
  siRNA target sequence for LOC271849 (NM_199022.1,405-423).
ccccagaatccaatctaaa

SEQ ID NO: 815635 - DNA, 19 bp, Mus musculus
  siRNA target sequence for LOC271849 (NM_199022.1,478-496).
ctctttgcgtcctgatact

SEQ ID NO: 815636 - DNA, 19 bp, Mus musculus
  siRNA target sequence for LOC271849 (NM_199022.1,569-587).
gggaacggtctgaactact

SEQ ID NO: 815637 - DNA, 19 bp, Mus musculus
  siRNA target sequence for LOC271849 (NM_199022.1,611-629).
gaagtgctgcaatcaatga

SEQ ID NO: 815638 - DNA, 19 bp, Mus musculus
  siRNA target sequence for LOC271849 (NM_199022.1,659-677).
gttacaagggaagcaataa

SEQ ID NO: 815639 - DNA, 19 bp, Mus musculus
  siRNA target sequence for LOC271849 (NM_199022.1,704-722).
gcccatggagccattaaaa

SEQ ID NO: 815640 - DNA, 19 bp, Mus musculus
  siRNA target sequence for LOC271849 (NM_199022.1,705-723).
cccatggagccattaaaaa

SEQ ID NO: 815641 - DNA, 19 bp, Mus musculus
  siRNA target sequence for LOC271849 (NM_199022.1,725-743).
cgaaaggctcccgttaagt

SEQ ID NO: 815642 - DNA, 19 bp, Mus musculus
  siRNA target sequence for LOC271849 (NM_199022.1,726-744).
gaaaggctcccgttaagtt

SEQ ID NO: 815643 - DNA, 19 bp, Mus musculus
  siRNA target sequence for LOC271849 (NM_199022.1,753-771).
cggttcttggcaaaagcaa

SEQ ID NO: 815644 - DNA, 19 bp, Mus musculus
  siRNA target sequence for LOC271849 (NM_199022.1,762-780).
gcaaaagcaatcttcagtt

SEQ ID NO: 815645 - DNA, 19 bp, Mus musculus
  siRNA target sequence for LOC271849 (NM_199022.1,783-801).
caggaatgaatataaaact

SEQ ID NO: 815646 - DNA, 19 bp, Mus musculus
  siRNA target sequence for LOC271849 (NM_199022.1,816-834).
gcagcctcacactgatgaa

SEQ ID NO: 815647 - DNA, 19 bp, Mus musculus
  siRNA target sequence for LOC271849 (NM_199022.1,835-853).
ccttgacaaccaacagatt

SEQ ID NO: 815648 - DNA, 19 bp, Mus musculus
  siRNA target sequence for LOC271849 (NM_199022.1,836-854).
cttgacaaccaacagatta

SEQ ID NO: 815649 - DNA, 19 bp, Mus musculus
  siRNA target sequence for LOC271849 (NM_199022.1,841-859).
caaccaacagattattgca

SEQ ID NO: 815650 - DNA, 19 bp, Mus musculus
  siRNA target sequence for LOC271849 (NM_199022.1,844-862).
ccaacagattattgcaaat

SEQ ID NO: 815651 - DNA, 19 bp, Mus musculus
  siRNA target sequence for LOC271849 (NM_199022.1,857-875).
gcaaatcaccaaatgcaat

SEQ ID NO: 815652 - DNA, 19 bp, Mus musculus
  siRNA target sequence for LOC271849 (NM_199022.1,865-883).
ccaaatgcaatcgatttca

SEQ ID NO: 815653 - DNA, 19 bp, Mus musculus
  siRNA target sequence for LOC271849 (NM_199022.1,866-884).
caaatgcaatcgatttcat

SEQ ID NO: 815654 - DNA, 19 bp, Mus musculus
  siRNA target sequence for LOC271849 (NM_199022.1,901-919).
ccctgataccacagactat

SEQ ID NO: 815655 - DNA, 19 bp, Mus musculus
  siRNA target sequence for LOC271849 (NM_199022.1,989-1007).
gcccaagacgtcataagca

SEQ ID NO: 815656 - DNA, 19 bp, Mus musculus
  siRNA target sequence for LOC271849 (NM_199022.1,1115-1133).
gaccatgactattacaact

SEQ ID NO: 815657 - DNA, 19 bp, Mus musculus
  siRNA target sequence for LOC271849 (NM_199022.1,1188-1206).
ctcaagctacagaccaaat

SEQ ID NO: 815658 - DNA, 19 bp, Mus musculus
  siRNA target sequence for LOC271849 (NM_199022.1,1217-1235).
cctatccggtgtgaaaagt

SEQ ID NO: 815659 - DNA, 19 bp, Mus musculus
  siRNA target sequence for LOC271849 (NM_199022.1,1218-1236).
ctatccggtgtgaaaagtt

SEQ ID NO: 815660 - DNA, 19 bp, Mus musculus
  siRNA target sequence for LOC271849 (NM_199022.1,1258-1276).
cacgtgcagcggtgtgtat

SEQ ID NO: 815661 - DNA, 19 bp, Mus musculus
  siRNA target sequence for LOC271849 (NM_199022.1,1260-1278).
cgtgcagcggtgtgtataa

SEQ ID NO: 815662 - DNA, 19 bp, Mus musculus
  siRNA target sequence for LOC271849 (NM_199022.1,1292-1310).
cggagcaggccaataggta

SEQ ID NO: 815663 - DNA, 19 bp, Mus musculus
  siRNA target sequence for LOC271849 (NM_199022.1,1293-1311).
ggagcaggccaataggtat

SEQ ID NO: 815664 - DNA, 19 bp, Mus musculus
  siRNA target sequence for LOC271849 (NM_199022.1,1381-1399).
cgacccctgctatgtcaat

SEQ ID NO: 815665 - DNA, 19 bp, Mus musculus
  siRNA target sequence for LOC271849 (NM_199022.1,1384-1402).
cccctgctatgtcaataca

SEQ ID NO: 815666 - DNA, 19 bp, Mus musculus
  siRNA target sequence for LOC271849 (NM_199022.1,1401-1419).
cacaggctcttcagagtat

SEQ ID NO: 815667 - DNA, 19 bp, Mus musculus
  siRNA target sequence for LOC271849 (NM_199022.1,1477-1495).
cggaaaggcaccagaaact

SEQ ID NO: 815668 - DNA, 19 bp, Mus musculus
  siRNA target sequence for LOC271849 (NM_199022.1,1596-1614).
gaggggcagcggagaaact

SEQ ID NO: 815669 - DNA, 19 bp, Mus musculus
  siRNA target sequence for LOC271849 (NM_199022.1,1599-1617).
gggcagcggagaaactttt

SEQ ID NO: 815670 - DNA, 19 bp, Mus musculus
  siRNA target sequence for LOC271849 (NM_199022.1,1602-1620).
cagcggagaaacttttggt

SEQ ID NO: 815671 - DNA, 19 bp, Mus musculus
  siRNA target sequence for LOC271849 (NM_199022.1,1766-1784).
gttggccaccttatcaaat

SEQ ID NO: 815672 - DNA, 19 bp, Mus musculus
  siRNA target sequence for LOC271849 (NM_199022.1,1772-1790).
caccttatcaaataccata

SEQ ID NO: 815673 - DNA, 19 bp, Mus musculus
  siRNA target sequence for LOC271849 (NM_199022.1,1824-1842).
gtgaagtacgccttaaaca

SEQ ID NO: 815674 - DNA, 19 bp, Mus musculus
  siRNA target sequence for LOC271849 (NM_199022.1,1832-1850).
cgccttaaacaaccaataa

SEQ ID NO: 815675 - DNA, 19 bp, Mus musculus
  siRNA target sequence for LOC277496 (NM_199023.1,70-88).
gcacgggagcgggacaaaa

SEQ ID NO: 815676 - DNA, 19 bp, Mus musculus
  siRNA target sequence for LOC277496 (NM_199023.1,71-89).
cacgggagcgggacaaaaa

SEQ ID NO: 815677 - DNA, 19 bp, Mus musculus
  siRNA target sequence for LOC277496 (NM_199023.1,73-91).
cgggagcgggacaaaaaca

SEQ ID NO: 815678 - DNA, 19 bp, Mus musculus
  siRNA target sequence for LOC277496 (NM_199023.1,75-93).
ggagcgggacaaaaacagt

SEQ ID NO: 815679 - DNA, 19 bp, Mus musculus
  siRNA target sequence for LOC277496 (NM_199023.1,361-379).
ctaccatctgagcatcaaa

SEQ ID NO: 815680 - DNA, 19 bp, Mus musculus
  siRNA target sequence for LOC277496 (NM_199023.1,382-400).
cggtttctgggccttatta

SEQ ID NO: 815681 - DNA, 19 bp, Mus musculus
  siRNA target sequence for LOC277496 (NM_199023.1,456-474).
gcgggcagaggaaatctct

SEQ ID NO: 815682 - DNA, 19 bp, Mus musculus
  siRNA target sequence for LOC277496 (NM_199023.1,457-475).
cgggcagaggaaatctctt

SEQ ID NO: 815683 - DNA, 19 bp, Mus musculus
  siRNA target sequence for LOC277496 (NM_199023.1,538-556).
caactgaagcccacaaaga

SEQ ID NO: 815684 - DNA, 19 bp, Mus musculus
  siRNA target sequence for LOC277496 (NM_199023.1,584-602).
ggaggcgtgttgagacaat

SEQ ID NO: 815685 - DNA, 19 bp, Mus musculus
  siRNA target sequence for Nol4 (NM_199024.1,1107-1125).
ccgaatggtcccaatctct

SEQ ID NO: 815686 - DNA, 19 bp, Mus musculus
  siRNA target sequence for Nol4 (NM_199024.1,1122-1140).
ctctaagcagcccaaagaa

SEQ ID NO: 815687 - DNA, 19 bp, Mus musculus
  siRNA target sequence for Nol4 (NM_199024.1,1192-1210).
gagcgtgccagaaaacgta

SEQ ID NO: 815688 - DNA, 19 bp, Mus musculus
  siRNA target sequence for Nol4 (NM_199024.1,1202-1220).
gaaaacgtatccgtactta

SEQ ID NO: 815689 - DNA, 19 bp, Mus musculus
  siRNA target sequence for Nol4 (NM_199024.1,1230-1248).
ctgcaggcggatgaaaaga

SEQ ID NO: 815690 - DNA, 19 bp, Mus musculus
  siRNA target sequence for Nol4 (NM_199024.1,1233-1251).
caggcggatgaaaagaagt

SEQ ID NO: 815691 - DNA, 19 bp, Mus musculus
  siRNA target sequence for Nol4 (NM_199024.1,1292-1310).
cagcagttgcagagagtat

SEQ ID NO: 815692 - DNA, 19 bp, Mus musculus
  siRNA target sequence for Nol4 (NM_199024.1,1325-1343).
gtgaaagcgagagtagaaa

SEQ ID NO: 815693 - DNA, 19 bp, Mus musculus
  siRNA target sequence for Nol4 (NM_199024.1,1353-1371).
gaggatgcgtctggataaa

SEQ ID NO: 815694 - DNA, 19 bp, Mus musculus
  siRNA target sequence for Nol4 (NM_199024.1,1356-1374).
gatgcgtctggataaagca

SEQ ID NO: 815695 - DNA, 19 bp, Mus musculus
  siRNA target sequence for Nol4 (NM_199024.1,1451-1469).
caggctcccaggaggtatt

SEQ ID NO: 815696 - DNA, 19 bp, Mus musculus
  siRNA target sequence for Nol4 (NM_199024.1,1453-1471).
ggctcccaggaggtattgt

SEQ ID NO: 815697 - DNA, 19 bp, Mus musculus
  siRNA target sequence for Nol4 (NM_199024.1,1454-1472).
gctcccaggaggtattgta

SEQ ID NO: 815698 - DNA, 19 bp, Mus musculus
  siRNA target sequence for Nol4 (NM_199024.1,1457-1475).
cccaggaggtattgtacat

SEQ ID NO: 815699 - DNA, 19 bp, Mus musculus
  siRNA target sequence for Nol4 (NM_199024.1,1459-1477).
caggaggtattgtacatca

SEQ ID NO: 815700 - DNA, 19 bp, Mus musculus
  siRNA target sequence for Nol4 (NM_199024.1,1461-1479).
ggaggtattgtacatcaat

SEQ ID NO: 815701 - DNA, 19 bp, Mus musculus
  siRNA target sequence for Nol4 (NM_199024.1,1481-1499).
gcaatgggacctacagtta

SEQ ID NO: 815702 - DNA, 19 bp, Mus musculus
  siRNA target sequence for Nol4 (NM_199024.1,1486-1504).
gggacctacagttaccata

SEQ ID NO: 815703 - DNA, 19 bp, Mus musculus
  siRNA target sequence for Nol4 (NM_199024.1,1633-1651).
ctcagtccgacggaaatca

SEQ ID NO: 815704 - DNA, 19 bp, Mus musculus
  siRNA target sequence for Nol4 (NM_199024.1,1635-1653).
cagtccgacggaaatcaat

SEQ ID NO: 815705 - DNA, 19 bp, Mus musculus
  siRNA target sequence for Nol4 (NM_199024.1,1665-1683).
gcttgtcgccggttatcga

SEQ ID NO: 815706 - DNA, 19 bp, Mus musculus
  siRNA target sequence for Nol4 (NM_199024.1,1681-1699).
cgagaatcggctgcatttt

SEQ ID NO: 815707 - DNA, 19 bp, Mus musculus
  siRNA target sequence for Nol4 (NM_199024.1,1682-1700).
gagaatcggctgcattttt

SEQ ID NO: 815708 - DNA, 19 bp, Mus musculus
  siRNA target sequence for Nol4 (NM_199024.1,1684-1702).
gaatcggctgcatttttat

SEQ ID NO: 815709 - DNA, 19 bp, Mus musculus
  siRNA target sequence for A630026F21Rik (NM_199025.1,60-78).
cgggtctgtctgccaaaat

SEQ ID NO: 815710 - DNA, 19 bp, Mus musculus
  siRNA target sequence for A630026F21Rik (NM_199025.1,62-80).
ggtctgtctgccaaaatgt

SEQ ID NO: 815711 - DNA, 19 bp, Mus musculus
  siRNA target sequence for A630026F21Rik (NM_199025.1,87-105).
gatcagatctccttcactt

SEQ ID NO: 815712 - DNA, 19 bp, Mus musculus
  siRNA target sequence for A630026F21Rik (NM_199025.1,113-131).
gaaaattatggagattcaa

SEQ ID NO: 815713 - DNA, 19 bp, Mus musculus
  siRNA target sequence for A630026F21Rik (NM_199025.1,123-141).
gagattcaatgttacaaaa

SEQ ID NO: 815714 - DNA, 19 bp, Mus musculus
  siRNA target sequence for A630026F21Rik (NM_199025.1,205-223).
ggtgcaggggcataaaatt

SEQ ID NO: 815715 - DNA, 19 bp, Mus musculus
  siRNA target sequence for A630026F21Rik (NM_199025.1,209-227).
caggggcataaaattgttt

SEQ ID NO: 815716 - DNA, 19 bp, Mus musculus
  siRNA target sequence for A630026F21Rik (NM_199025.1,256-274).
ccagtttttactgaatgat

SEQ ID NO: 815717 - DNA, 19 bp, Mus musculus
  siRNA target sequence for A630026F21Rik (NM_199025.1,257-275).
cagtttttactgaatgatt

SEQ ID NO: 815718 - DNA, 19 bp, Mus musculus
  siRNA target sequence for A630026F21Rik (NM_199025.1,272-290).
gattcccgagaggtgaaaa

SEQ ID NO: 815719 - DNA, 19 bp, Mus musculus
  siRNA target sequence for A630026F21Rik (NM_199025.1,328-346).
gctcttgtcctgttatagt

SEQ ID NO: 815720 - DNA, 19 bp, Mus musculus
  siRNA target sequence for A630026F21Rik (NM_199025.1,385-403).
cttgactgctgcgagtttt

SEQ ID NO: 815721 - DNA, 19 bp, Mus musculus
  siRNA target sequence for A630026F21Rik (NM_199025.1,437-455).
caggcgctgtggaagttta

SEQ ID NO: 815722 - DNA, 19 bp, Mus musculus
  siRNA target sequence for A630026F21Rik (NM_199025.1,439-457).
ggcgctgtggaagtttata

SEQ ID NO: 815723 - DNA, 19 bp, Mus musculus
  siRNA target sequence for A630026F21Rik (NM_199025.1,440-458).
gcgctgtggaagtttataa

SEQ ID NO: 815724 - DNA, 19 bp, Mus musculus
  siRNA target sequence for A630026F21Rik (NM_199025.1,441-459).
cgctgtggaagtttataaa

SEQ ID NO: 815725 - DNA, 19 bp, Mus musculus
  siRNA target sequence for A630026F21Rik (NM_199025.1,510-528).
ctccccagtcgaaagaaca

SEQ ID NO: 815726 - DNA, 19 bp, Mus musculus
  siRNA target sequence for A630026F21Rik (NM_199025.1,551-569).
ccaaagcaggacttacctt

SEQ ID NO: 815727 - DNA, 19 bp, Mus musculus
  siRNA target sequence for A630026F21Rik (NM_199025.1,556-574).
gcaggacttaccttgtatt

SEQ ID NO: 815728 - DNA, 19 bp, Mus musculus
  siRNA target sequence for A630026F21Rik (NM_199025.1,582-600).
ctgaagacagtatggatat

SEQ ID NO: 815729 - DNA, 19 bp, Mus musculus
  siRNA target sequence for A630026F21Rik (NM_199025.1,607-625).
cagtgatattcagattgtt

SEQ ID NO: 815730 - DNA, 19 bp, Mus musculus
  siRNA target sequence for A630026F21Rik (NM_199025.1,609-627).
gtgatattcagattgttaa

SEQ ID NO: 815731 - DNA, 19 bp, Mus musculus
  siRNA target sequence for A630026F21Rik (NM_199025.1,636-654).
ctattggggatgtatcaga

SEQ ID NO: 815732 - DNA, 19 bp, Mus musculus
  siRNA target sequence for A630026F21Rik (NM_199025.1,671-689).
gatgagaaccagtacattt

SEQ ID NO: 815733 - DNA, 19 bp, Mus musculus
  siRNA target sequence for A630026F21Rik (NM_199025.1,674-692).
gagaaccagtacatttctt

SEQ ID NO: 815734 - DNA, 19 bp, Mus musculus
  siRNA target sequence for A630026F21Rik (NM_199025.1,676-694).
gaaccagtacatttcttct

SEQ ID NO: 815735 - DNA, 19 bp, Mus musculus
  siRNA target sequence for A630026F21Rik (NM_199025.1,723-741).
cccagcactccctgataaa

SEQ ID NO: 815736 - DNA, 19 bp, Mus musculus
  siRNA target sequence for A630026F21Rik (NM_199025.1,727-745).
gcactccctgataaactca

SEQ ID NO: 815737 - DNA, 19 bp, Mus musculus
  siRNA target sequence for A630026F21Rik (NM_199025.1,802-820).
ctcttacacaggcaatgat

SEQ ID NO: 815738 - DNA, 19 bp, Mus musculus
  siRNA target sequence for A630026F21Rik (NM_199025.1,842-860).
gatgtctttgggcctaata

SEQ ID NO: 815739 - DNA, 19 bp, Mus musculus
  siRNA target sequence for A630026F21Rik (NM_199025.1,847-865).
ctttgggcctaatattcga

SEQ ID NO: 815740 - DNA, 19 bp, Mus musculus
  siRNA target sequence for A630026F21Rik (NM_199025.1,932-950).
gagaactacgccaaccatt

SEQ ID NO: 815741 - DNA, 19 bp, Mus musculus
  siRNA target sequence for A630026F21Rik (NM_199025.1,934-952).
gaactacgccaaccattta

SEQ ID NO: 815742 - DNA, 19 bp, Mus musculus
  siRNA target sequence for A630026F21Rik (NM_199025.1,937-955).
ctacgccaaccatttaaaa

SEQ ID NO: 815743 - DNA, 19 bp, Mus musculus
  siRNA target sequence for A630026F21Rik (NM_199025.1,1028-1046).
cgtgtacatgccggaatta

SEQ ID NO: 815744 - DNA, 19 bp, Mus musculus
  siRNA target sequence for A630026F21Rik (NM_199025.1,1029-1047).
gtgtacatgccggaattaa

SEQ ID NO: 815745 - DNA, 19 bp, Mus musculus
  siRNA target sequence for A630026F21Rik (NM_199025.1,1095-1113).
ccttacaggaccatcttaa

SEQ ID NO: 815746 - DNA, 19 bp, Mus musculus
  siRNA target sequence for A630026F21Rik (NM_199025.1,1132-1150).
gccccataaatgtaactat

SEQ ID NO: 815747 - DNA, 19 bp, Mus musculus
  siRNA target sequence for A630026F21Rik (NM_199025.1,1133-1151).
ccccataaatgtaactatt

SEQ ID NO: 815748 - DNA, 19 bp, Mus musculus
  siRNA target sequence for A630026F21Rik (NM_199025.1,1268-1286).
gactcttttgcatgtacaa

SEQ ID NO: 815749 - DNA, 19 bp, Mus musculus
  siRNA target sequence for A630026F21Rik (NM_199025.1,1270-1288).
ctcttttgcatgtacaaca

SEQ ID NO: 815750 - DNA, 19 bp, Mus musculus
  siRNA target sequence for A630026F21Rik (NM_199025.1,1330-1348).
ggtcctggatgcaggtaaa

SEQ ID NO: 815751 - DNA, 19 bp, Mus musculus
  siRNA target sequence for A630026F21Rik (NM_199025.1,1355-1373).
caagctgtcctcagcttaa

SEQ ID NO: 815752 - DNA, 19 bp, Mus musculus
  siRNA target sequence for Pigl (NM_199026.1,4-22).
gaattggtgggtttcttgt

SEQ ID NO: 815753 - DNA, 19 bp, Mus musculus
  siRNA target sequence for Pigl (NM_199026.1,65-83).
ggaactcagcggaacgaat

SEQ ID NO: 815754 - DNA, 19 bp, Mus musculus
  siRNA target sequence for Pigl (NM_199026.1,231-249).
ctcaggaaactactacaat

SEQ ID NO: 815755 - DNA, 19 bp, Mus musculus
  siRNA target sequence for Pigl (NM_199026.1,254-272).
gtgagattcgaaagaaaga

SEQ ID NO: 815756 - DNA, 19 bp, Mus musculus
  siRNA target sequence for Pigl (NM_199026.1,304-322).
ccaccttcccgtgtaatga

SEQ ID NO: 815757 - DNA, 19 bp, Mus musculus
  siRNA target sequence for Pigl (NM_199026.1,305-323).
caccttcccgtgtaatgat

SEQ ID NO: 815758 - DNA, 19 bp, Mus musculus
  siRNA target sequence for Pigl (NM_199026.1,307-325).
ccttcccgtgtaatgatta

SEQ ID NO: 815759 - DNA, 19 bp, Mus musculus
  siRNA target sequence for Pigl (NM_199026.1,308-326).
cttcccgtgtaatgattat

SEQ ID NO: 815760 - DNA, 19 bp, Mus musculus
  siRNA target sequence for Pigl (NM_199026.1,311-329).
cccgtgtaatgattattga

SEQ ID NO: 815761 - DNA, 19 bp, Mus musculus
  siRNA target sequence for Pigl (NM_199026.1,313-331).
cgtgtaatgattattgaca

SEQ ID NO: 815762 - DNA, 19 bp, Mus musculus
  siRNA target sequence for Pigl (NM_199026.1,419-437).
ctgacctggtggtgacttt

SEQ ID NO: 815763 - DNA, 19 bp, Mus musculus
  siRNA target sequence for Pigl (NM_199026.1,460-478).
cacagcaaccatattgctt

SEQ ID NO: 815764 - DNA, 19 bp, Mus musculus
  siRNA target sequence for Pigl (NM_199026.1,464-482).
gcaaccatattgctttgta

SEQ ID NO: 815765 - DNA, 19 bp, Mus musculus
  siRNA target sequence for Pigl (NM_199026.1,725-743).
cagtgaggtgcctctataa

SEQ ID NO: 815766 - DNA, 19 bp, Mus musculus
  siRNA target sequence for Znf335 (NM_199027.1,411-429).
gcgaccgtcccaggattaa

SEQ ID NO: 815767 - DNA, 19 bp, Mus musculus
  siRNA target sequence for Znf335 (NM_199027.1,681-699).
gacaagatcatcgaatcta

SEQ ID NO: 815768 - DNA, 19 bp, Mus musculus
  siRNA target sequence for Znf335 (NM_199027.1,686-704).
gatcatcgaatctaccatt

SEQ ID NO: 815769 - DNA, 19 bp, Mus musculus
  siRNA target sequence for Znf335 (NM_199027.1,1014-1032).
gttgtgcaacagttcaagt

SEQ ID NO: 815770 - DNA, 19 bp, Mus musculus
  siRNA target sequence for Znf335 (NM_199027.1,1638-1656).
cgaaagtactactataagt

SEQ ID NO: 815771 - DNA, 19 bp, Mus musculus
  siRNA target sequence for Znf335 (NM_199027.1,1813-1831).
cgctcaaggagcacatgtt

SEQ ID NO: 815772 - DNA, 19 bp, Mus musculus
  siRNA target sequence for Znf335 (NM_199027.1,1886-1904).
ctaccgcaaggatgttatt

SEQ ID NO: 815773 - DNA, 19 bp, Mus musculus
  siRNA target sequence for Znf335 (NM_199027.1,2057-2075).
catgtgcgataagattcaa

SEQ ID NO: 815774 - DNA, 19 bp, Mus musculus
  siRNA target sequence for AK122525 (NM_199028.1,690-708).
gcccctatgagctctttga

SEQ ID NO: 815775 - DNA, 19 bp, Mus musculus
  siRNA target sequence for AK122525 (NM_199028.1,818-836).
ctgatccagaagatgttct

SEQ ID NO: 815776 - DNA, 19 bp, Mus musculus
  siRNA target sequence for AK122525 (NM_199028.1,848-866).
ggactcacgactaatatgt

SEQ ID NO: 815777 - DNA, 19 bp, Mus musculus
  siRNA target sequence for AK122525 (NM_199028.1,983-1001).
gcttccgagctgaaacaaa

SEQ ID NO: 815778 - DNA, 19 bp, Mus musculus
  siRNA target sequence for AK122525 (NM_199028.1,1116-1134).
ccgccaagcggaagttaga

SEQ ID NO: 815779 - DNA, 19 bp, Mus musculus
  siRNA target sequence for AK122525 (NM_199028.1,1648-1666).
gtgtgcccagcgcatcaat

SEQ ID NO: 815780 - DNA, 19 bp, Mus musculus
  siRNA target sequence for AK122525 (NM_199028.1,1650-1668).
gtgcccagcgcatcaatga

SEQ ID NO: 815781 - DNA, 19 bp, Mus musculus
  siRNA target sequence for AK122525 (NM_199028.1,2006-2024).
ctgcgcaagcagtacaact

SEQ ID NO: 815782 - DNA, 19 bp, Mus musculus
  siRNA target sequence for AK122525 (NM_199028.1,2235-2253).
gccgggacctagcaagtta

SEQ ID NO: 815783 - DNA, 19 bp, Mus musculus
  siRNA target sequence for AK122525 (NM_199028.1,2271-2289).
ggttccgtgaggagtttga

SEQ ID NO: 815784 - DNA, 19 bp, Mus musculus
  siRNA target sequence for AK122525 (NM_199028.1,2627-2645).
cactatgaatgtataccta

SEQ ID NO: 815785 - DNA, 19 bp, Mus musculus
  siRNA target sequence for AK122525 (NM_199028.1,2637-2655).
gtatacctagcattgatga

SEQ ID NO: 815786 - DNA, 19 bp, Mus musculus
  siRNA target sequence for AK122525 (NM_199028.1,2663-2681).
cgccgtcccaacaggaaaa

SEQ ID NO: 815787 - DNA, 19 bp, Mus musculus
  siRNA target sequence for BC062951 (NM_199032.1,142-160).
ggtagaaaaacttttcagt

SEQ ID NO: 815788 - DNA, 19 bp, Mus musculus
  siRNA target sequence for BC062951 (NM_199032.1,164-182).
ctcgttcatacgacagaaa

SEQ ID NO: 815789 - DNA, 19 bp, Mus musculus
  siRNA target sequence for BC062951 (NM_199032.1,207-225).
cgggaaaggcggaaaagga

SEQ ID NO: 815790 - DNA, 19 bp, Mus musculus
  siRNA target sequence for BC062951 (NM_199032.1,228-246).
gtgccaatctcgattttgt

SEQ ID NO: 815791 - DNA, 19 bp, Mus musculus
  siRNA target sequence for BC062951 (NM_199032.1,230-248).
gccaatctcgattttgttt

SEQ ID NO: 815792 - DNA, 19 bp, Mus musculus
  siRNA target sequence for BC062951 (NM_199032.1,251-269).
gaaccttataaacttgaaa

SEQ ID NO: 815793 - DNA, 19 bp, Mus musculus
  siRNA target sequence for BC062951 (NM_199032.1,331-349).
ctcagacaagcacattaaa

SEQ ID NO: 815794 - DNA, 19 bp, Mus musculus
  siRNA target sequence for BC062951 (NM_199032.1,385-403).
gacagctgatctgaagttt

SEQ ID NO: 815795 - DNA, 19 bp, Mus musculus
  siRNA target sequence for BC062951 (NM_199032.1,546-564).
ggcgccagcggatgcaaat

SEQ ID NO: 815796 - DNA, 19 bp, Mus musculus
  siRNA target sequence for BC062951 (NM_199032.1,549-567).
gccagcggatgcaaatcga

SEQ ID NO: 815797 - DNA, 19 bp, Mus musculus
  siRNA target sequence for BC062951 (NM_199032.1,550-568).
ccagcggatgcaaatcgat

SEQ ID NO: 815798 - DNA, 19 bp, Mus musculus
  siRNA target sequence for BC062951 (NM_199032.1,847-865).
gaaactcattgctcactta

SEQ ID NO: 815799 - DNA, 19 bp, Mus musculus
  siRNA target sequence for BC062951 (NM_199032.1,1121-1139).
cggaaccttgaggaaaaaa

SEQ ID NO: 815800 - DNA, 19 bp, Mus musculus
  siRNA target sequence for BC062951 (NM_199032.1,1321-1339).
gaggatgaggctagaacat

SEQ ID NO: 815801 - DNA, 19 bp, Mus musculus
  siRNA target sequence for BC062951 (NM_199032.1,1366-1384).
ctctcgtctggacacattt

SEQ ID NO: 815802 - DNA, 19 bp, Mus musculus
  siRNA target sequence for BC062951 (NM_199032.1,1368-1386).
ctcgtctggacacatttct

SEQ ID NO: 815803 - DNA, 19 bp, Mus musculus
  siRNA target sequence for BC062951 (NM_199032.1,1400-1418).
gaagagcgcgattattaca

SEQ ID NO: 815804 - DNA, 19 bp, Mus musculus
  siRNA target sequence for BC062951 (NM_199032.1,1403-1421).
gagcgcgattattacaaga

SEQ ID NO: 815805 - DNA, 19 bp, Mus musculus
  siRNA target sequence for BC062951 (NM_199032.1,1405-1423).
gcgcgattattacaagaaa

SEQ ID NO: 815806 - DNA, 19 bp, Mus musculus
  siRNA target sequence for BC062951 (NM_199032.1,1445-1463).
ctaatccagcggagatctt

SEQ ID NO: 815807 - DNA, 19 bp, Mus musculus
  siRNA target sequence for BC062951 (NM_199032.1,1455-1473).
ggagatcttgtgcgattaa

SEQ ID NO: 815808 - DNA, 19 bp, Mus musculus
  siRNA target sequence for BC062951 (NM_199032.1,1456-1474).
gagatcttgtgcgattaat

SEQ ID NO: 815809 - DNA, 19 bp, Mus musculus
  siRNA target sequence for BC062951 (NM_199032.1,1458-1476).
gatcttgtgcgattaatta

SEQ ID NO: 815810 - DNA, 19 bp, Mus musculus
  siRNA target sequence for BC062951 (NM_199032.1,1477-1495).
ctccgctcgggaaaaacct

SEQ ID NO: 815811 - DNA, 19 bp, Mus musculus
  siRNA target sequence for BC062951 (NM_199032.1,1535-1553).
gacgttcacctgatcacaa

SEQ ID NO: 815812 - DNA, 19 bp, Mus musculus
  siRNA target sequence for BC062951 (NM_199032.1,1654-1672).
gaatgtcctgtataaggaa

SEQ ID NO: 815813 - DNA, 19 bp, Mus musculus
  siRNA target sequence for BC062951 (NM_199032.1,1673-1691).
gcaaaggaagagttgtcta

SEQ ID NO: 815814 - DNA, 19 bp, Mus musculus
  siRNA target sequence for BC062951 (NM_199032.1,1723-1741).
ccccaaccatcttgttagt

SEQ ID NO: 815815 - DNA, 19 bp, Mus musculus
  siRNA target sequence for BC062951 (NM_199032.1,1726-1744).
caaccatcttgttagttgt

SEQ ID NO: 815816 - DNA, 19 bp, Mus musculus
  siRNA target sequence for BC062951 (NM_199032.1,1729-1747).
ccatcttgttagttgtgta

SEQ ID NO: 815817 - DNA, 19 bp, Mus musculus
  siRNA target sequence for BC062951 (NM_199032.1,1733-1751).
cttgttagttgtgtagaaa

SEQ ID NO: 815818 - DNA, 19 bp, Mus musculus
  siRNA target sequence for BC062951 (NM_199032.1,1756-1774).
gaaagaacgcgcgttatct

SEQ ID NO: 815819 - DNA, 19 bp, Mus musculus
  siRNA target sequence for BC062951 (NM_199032.1,1766-1784).
gcgttatctgagttgagaa

SEQ ID NO: 815820 - DNA, 19 bp, Mus musculus
  siRNA target sequence for BC062951 (NM_199032.1,1840-1858).
gaatgctgttggaaaatca

SEQ ID NO: 815821 - DNA, 19 bp, Mus musculus
  siRNA target sequence for BC062951 (NM_199032.1,1857-1875).
cagacttagagaaaactat

SEQ ID NO: 815822 - DNA, 19 bp, Mus musculus
  siRNA target sequence for BC062951 (NM_199032.1,1872-1890).
ctattgaacatttgacata

SEQ ID NO: 815823 - DNA, 19 bp, Mus musculus
  siRNA target sequence for BC062951 (NM_199032.1,1932-1950).
ctaaaatgttaatgatgaa

SEQ ID NO: 815824 - DNA, 19 bp, Mus musculus
  siRNA target sequence for BC062951 (NM_199032.1,1960-1978).
ggagtcattagagaacaaa

SEQ ID NO: 815825 - DNA, 19 bp, Mus musculus
  siRNA target sequence for BC062951 (NM_199032.1,1963-1981).
gtcattagagaacaaatca

SEQ ID NO: 815826 - DNA, 19 bp, Mus musculus
  siRNA target sequence for BC062951 (NM_199032.1,1980-1998).
caaaactccaagctcaaaa

SEQ ID NO: 815827 - DNA, 19 bp, Mus musculus
  siRNA target sequence for BC062951 (NM_199032.1,1985-2003).
ctccaagctcaaaagctta

SEQ ID NO: 815828 - DNA, 19 bp, Mus musculus
  siRNA target sequence for BC062951 (NM_199032.1,2020-2038).
ctcatctcatcagaaaaca

SEQ ID NO: 815829 - DNA, 19 bp, Mus musculus
  siRNA target sequence for BC062951 (NM_199032.1,2022-2040).
catctcatcagaaaacaga

SEQ ID NO: 815830 - DNA, 19 bp, Mus musculus
  siRNA target sequence for BC062951 (NM_199032.1,2071-2089).
gctacagcgctcacttgat

SEQ ID NO: 815831 - DNA, 19 bp, Mus musculus
  siRNA target sequence for BC062951 (NM_199032.1,2094-2112).
gtcagcaccgactttccat

SEQ ID NO: 815832 - DNA, 19 bp, Mus musculus
  siRNA target sequence for BC062951 (NM_199032.1,2096-2114).
cagcaccgactttccataa

SEQ ID NO: 815833 - DNA, 19 bp, Mus musculus
  siRNA target sequence for BC062951 (NM_199032.1,2098-2116).
gcaccgactttccataaaa

SEQ ID NO: 815834 - DNA, 19 bp, Mus musculus
  siRNA target sequence for BC062951 (NM_199032.1,2101-2119).
ccgactttccataaaaaga

SEQ ID NO: 815835 - DNA, 19 bp, Mus musculus
  siRNA target sequence for BC062951 (NM_199032.1,2110-2128).
cataaaaagaggtgaactt

SEQ ID NO: 815836 - DNA, 19 bp, Mus musculus
  siRNA target sequence for BC062951 (NM_199032.1,2306-2324).
caggaaagcctccttagta

SEQ ID NO: 815837 - DNA, 19 bp, Mus musculus
  siRNA target sequence for BC062951 (NM_199032.1,2406-2424).
ctcgagaccgagagataaa

SEQ ID NO: 815838 - DNA, 19 bp, Mus musculus
  siRNA target sequence for BC062951 (NM_199032.1,2408-2426).
cgagaccgagagataaaca

SEQ ID NO: 815839 - DNA, 19 bp, Mus musculus
  siRNA target sequence for BC062951 (NM_199032.1,2451-2469).
ctcacaaggagcttgatga

SEQ ID NO: 815840 - DNA, 19 bp, Mus musculus
  siRNA target sequence for BC062951 (NM_199032.1,2528-2546).
gccacaatggcgagagaaa

SEQ ID NO: 815841 - DNA, 19 bp, Mus musculus
  siRNA target sequence for BC062951 (NM_199032.1,2529-2547).
ccacaatggcgagagaaaa

SEQ ID NO: 815842 - DNA, 19 bp, Mus musculus
  siRNA target sequence for BC062951 (NM_199032.1,2532-2550).
caatggcgagagaaaatca

SEQ ID NO: 815843 - DNA, 19 bp, Mus musculus
  siRNA target sequence for BC062951 (NM_199032.1,2604-2622).
gcagagtccataagtacat

SEQ ID NO: 815844 - DNA, 19 bp, Mus musculus
  siRNA target sequence for BC062951 (NM_199032.1,2899-2917).
ggccatgtctcagttagaa

SEQ ID NO: 815845 - DNA, 19 bp, Mus musculus
  siRNA target sequence for BC062951 (NM_199032.1,2901-2919).
ccatgtctcagttagaaga

SEQ ID NO: 815846 - DNA, 19 bp, Mus musculus
  siRNA target sequence for BC062951 (NM_199032.1,3059-3077).
gcggtagcagaattagaga

SEQ ID NO: 815847 - DNA, 19 bp, Mus musculus
  siRNA target sequence for BC062951 (NM_199032.1,3060-3078).
cggtagcagaattagagaa

SEQ ID NO: 815848 - DNA, 19 bp, Mus musculus
  siRNA target sequence for BC062951 (NM_199032.1,3151-3169).
gttgttagctacaaacaga

SEQ ID NO: 815849 - DNA, 19 bp, Mus musculus
  siRNA target sequence for BC062951 (NM_199032.1,3418-3436).
gagctctactctgaaatct

SEQ ID NO: 815850 - DNA, 19 bp, Mus musculus
  siRNA target sequence for BC062951 (NM_199032.1,3445-3463).
gactcctgatcatataaat

SEQ ID NO: 815851 - DNA, 19 bp, Mus musculus
  siRNA target sequence for BC062951 (NM_199032.1,3449-3467).
cctgatcatataaatgcat

SEQ ID NO: 815852 - DNA, 19 bp, Mus musculus
  siRNA target sequence for AU067695 (NM_199033.1,64-82).
cgtgctcctaagaggaaaa

SEQ ID NO: 815853 - DNA, 19 bp, Mus musculus
  siRNA target sequence for AU067695 (NM_199033.1,83-101).
gaagagtctatgagagtta

SEQ ID NO: 815854 - DNA, 19 bp, Mus musculus
  siRNA target sequence for AU067695 (NM_199033.1,146-164).
ggaaggaattccgaatatt

SEQ ID NO: 815855 - DNA, 19 bp, Mus musculus
  siRNA target sequence for AU067695 (NM_199033.1,166-184).
caggctgaaatgattagca

SEQ ID NO: 815856 - DNA, 19 bp, Mus musculus
  siRNA target sequence for AU067695 (NM_199033.1,225-243).
gtatgggaagggttacttt

SEQ ID NO: 815857 - DNA, 19 bp, Mus musculus
  siRNA target sequence for AU067695 (NM_199033.1,260-278).
ccagaagccgtccaaactt

SEQ ID NO: 815858 - DNA, 19 bp, Mus musculus
  siRNA target sequence for AU067695 (NM_199033.1,779-797).
gggctgctcacgagtatgt

SEQ ID NO: 815859 - DNA, 19 bp, Mus musculus
  siRNA target sequence for AU067695 (NM_199033.1,845-863).
cggcatcagacgagaagtt

SEQ ID NO: 815860 - DNA, 19 bp, Mus musculus
  siRNA target sequence for AU067695 (NM_199033.1,853-871).
gacgagaagttgctgaaaa

SEQ ID NO: 815861 - DNA, 19 bp, Mus musculus
  siRNA target sequence for AU067695 (NM_199033.1,898-916).
ccatacaggatctttgagt

SEQ ID NO: 815862 - DNA, 19 bp, Mus musculus
  siRNA target sequence for AU067695 (NM_199033.1,899-917).
catacaggatctttgagta

SEQ ID NO: 815863 - DNA, 19 bp, Mus musculus
  siRNA target sequence for AU067695 (NM_199033.1,960-978).
cctgggatgcctaagtatt

SEQ ID NO: 815864 - DNA, 19 bp, Mus musculus
  siRNA target sequence for AU067695 (NM_199033.1,964-982).
ggatgcctaagtatttact

SEQ ID NO: 815865 - DNA, 19 bp, Mus musculus
  siRNA target sequence for AU067695 (NM_199033.1,965-983).
gatgcctaagtatttacta

SEQ ID NO: 815866 - DNA, 19 bp, Mus musculus
  siRNA target sequence for AU067695 (NM_199033.1,968-986).
gcctaagtatttactatga

SEQ ID NO: 815867 - DNA, 19 bp, Mus musculus
  siRNA target sequence for AU067695 (NM_199033.1,970-988).
ctaagtatttactatgaga

SEQ ID NO: 815868 - DNA, 19 bp, Mus musculus
  siRNA target sequence for AU067695 (NM_199033.1,997-1015).
ctgacaatagtgaaactct

SEQ ID NO: 815869 - DNA, 19 bp, Mus musculus
  siRNA target sequence for AU067695 (NM_199033.1,1098-1116).
caaagtggggctcaagtat

SEQ ID NO: 815870 - DNA, 19 bp, Mus musculus
  siRNA target sequence for AU067695 (NM_199033.1,1107-1125).
gctcaagtatggaacagat

SEQ ID NO: 815871 - DNA, 19 bp, Mus musculus
  siRNA target sequence for AU067695 (NM_199033.1,1138-1156).
cggaaaggccctccatttt

SEQ ID NO: 815872 - DNA, 19 bp, Mus musculus
  siRNA target sequence for AU067695 (NM_199033.1,1139-1157).
ggaaaggccctccatttta

SEQ ID NO: 815873 - DNA, 19 bp, Mus musculus
  siRNA target sequence for AU067695 (NM_199033.1,1279-1297).
gagctgatgctgtgttatt

SEQ ID NO: 815874 - DNA, 19 bp, Mus musculus
  siRNA target sequence for AU067695 (NM_199033.1,1363-1381).
gttcaggaggtgattctca

SEQ ID NO: 815875 - DNA, 19 bp, Mus musculus
  siRNA target sequence for AU067695 (NM_199033.1,1378-1396).
ctcagccgatgggtttctt

SEQ ID NO: 815876 - DNA, 19 bp, Mus musculus
  siRNA target sequence for LOC381816 (NM_199034.1,338-356).
cctagaaaatttacagtta

SEQ ID NO: 815877 - DNA, 19 bp, Mus musculus
  siRNA target sequence for LOC381816 (NM_199034.1,378-396).
catgtgacgacgaggtaaa

SEQ ID NO: 815878 - DNA, 19 bp, Mus musculus
  siRNA target sequence for LOC381816 (NM_199034.1,381-399).
gtgacgacgaggtaaagct

SEQ ID NO: 815879 - DNA, 19 bp, Mus musculus
  siRNA target sequence for LOC381816 (NM_199034.1,403-421).
ccctaaagactggaacaaa

SEQ ID NO: 815880 - DNA, 19 bp, Mus musculus
  siRNA target sequence for LOC381816 (NM_199034.1,405-423).
ctaaagactggaacaaact

SEQ ID NO: 815881 - DNA, 19 bp, Mus musculus
  siRNA target sequence for LOC381816 (NM_199034.1,443-461).
cgtatccaacataaaaact

SEQ ID NO: 815882 - DNA, 19 bp, Mus musculus
  siRNA target sequence for LOC381816 (NM_199034.1,514-532).
gttcatcgacaaaactgaa

SEQ ID NO: 815883 - DNA, 19 bp, Mus musculus
  siRNA target sequence for LOC381816 (NM_199034.1,562-580).
gatgaaaacatattggatt

SEQ ID NO: 815884 - DNA, 19 bp, Mus musculus
  siRNA target sequence for LOC381816 (NM_199034.1,581-599).
ggactgcacagacaaaatt

SEQ ID NO: 815885 - DNA, 19 bp, Mus musculus
  siRNA target sequence for LOC381816 (NM_199034.1,582-600).
gactgcacagacaaaattt

SEQ ID NO: 815886 - DNA, 19 bp, Mus musculus
  siRNA target sequence for LOC381816 (NM_199034.1,589-607).
cagacaaaatttattagga

SEQ ID NO: 815887 - DNA, 19 bp, Mus musculus
  siRNA target sequence for LOC381816 (NM_199034.1,591-609).
gacaaaatttattaggaat

SEQ ID NO: 815888 - DNA, 19 bp, Mus musculus
  siRNA target sequence for LOC381816 (NM_199034.1,610-628).
ctgggtttggacaaatgga

SEQ ID NO: 815889 - DNA, 19 bp, Mus musculus
  siRNA target sequence for LOC381816 (NM_199034.1,646-664).
gcatgagatccaagatcat

SEQ ID NO: 815890 - DNA, 19 bp, Mus musculus
  siRNA target sequence for LOC381816 (NM_199034.1,683-701).
catcaaaagggcatagaca

SEQ ID NO: 815891 - DNA, 19 bp, Mus musculus
  siRNA target sequence for LOC381816 (NM_199034.1,705-723).
ccagttgtgaggatcaaaa

SEQ ID NO: 815892 - DNA, 19 bp, Mus musculus
  siRNA target sequence for Alg8 (NM_199035.1,68-86).
ggggtgactctccttaagt

SEQ ID NO: 815893 - DNA, 19 bp, Mus musculus
  siRNA target sequence for Alg8 (NM_199035.1,92-110).
ctcatccccacctaccatt

SEQ ID NO: 815894 - DNA, 19 bp, Mus musculus
  siRNA target sequence for Alg8 (NM_199035.1,103-121).
ctaccattccacggatttt

SEQ ID NO: 815895 - DNA, 19 bp, Mus musculus
  siRNA target sequence for Alg8 (NM_199035.1,106-124).
ccattccacggattttgaa

SEQ ID NO: 815896 - DNA, 19 bp, Mus musculus
  siRNA target sequence for Alg8 (NM_199035.1,111-129).
ccacggattttgaagtaca

SEQ ID NO: 815897 - DNA, 19 bp, Mus musculus
  siRNA target sequence for Alg8 (NM_199035.1,175-193).
gtattatgaggcaacttca

SEQ ID NO: 815898 - DNA, 19 bp, Mus musculus
  siRNA target sequence for Alg8 (NM_199035.1,192-210).
cagagtggaccttggatta

SEQ ID NO: 815899 - DNA, 19 bp, Mus musculus
  siRNA target sequence for Alg8 (NM_199035.1,214-232).
ccccttttttgcatggttt

SEQ ID NO: 815900 - DNA, 19 bp, Mus musculus
  siRNA target sequence for Alg8 (NM_199035.1,229-247).
gtttgagtacgccttatca

SEQ ID NO: 815901 - DNA, 19 bp, Mus musculus
  siRNA target sequence for Alg8 (NM_199035.1,233-251).
gagtacgccttatcacata

SEQ ID NO: 815902 - DNA, 19 bp, Mus musculus
  siRNA target sequence for Alg8 (NM_199035.1,235-253).
gtacgccttatcacatatt

SEQ ID NO: 815903 - DNA, 19 bp, Mus musculus
  siRNA target sequence for Alg8 (NM_199035.1,266-284).
gatcaagagatgctcaata

SEQ ID NO: 815904 - DNA, 19 bp, Mus musculus
  siRNA target sequence for Alg8 (NM_199035.1,287-305).
cataacctgaactattaca

SEQ ID NO: 815905 - DNA, 19 bp, Mus musculus
  siRNA target sequence for Alg8 (NM_199035.1,306-324).
gttcaaggacattgctttt

SEQ ID NO: 815906 - DNA, 19 bp, Mus musculus
  siRNA target sequence for Alg8 (NM_199035.1,379-397).
gtgctgtaaatgcattgat

SEQ ID NO: 815907 - DNA, 19 bp, Mus musculus
  siRNA target sequence for Alg8 (NM_199035.1,475-493).
gttaattgtagaccatatt

SEQ ID NO: 815908 - DNA, 19 bp, Mus musculus
  siRNA target sequence for Alg8 (NM_199035.1,485-503).
gaccatattcattttcagt

SEQ ID NO: 815909 - DNA, 19 bp, Mus musculus
  siRNA target sequence for Alg8 (NM_199035.1,535-553).
gtccattgcacgtctattt

SEQ ID NO: 815910 - DNA, 19 bp, Mus musculus
  siRNA target sequence for Alg8 (NM_199035.1,537-555).
ccattgcacgtctatttca

SEQ ID NO: 815911 - DNA, 19 bp, Mus musculus
  siRNA target sequence for Alg8 (NM_199035.1,542-560).
gcacgtctatttcagaaaa

SEQ ID NO: 815912 - DNA, 19 bp, Mus musculus
  siRNA target sequence for Alg8 (NM_199035.1,602-620).
ctcaagcacatctacctat

SEQ ID NO: 815913 - DNA, 19 bp, Mus musculus
  siRNA target sequence for Alg8 (NM_199035.1,661-679).
ctgcttcactgcaagtaaa

SEQ ID NO: 815914 - DNA, 19 bp, Mus musculus
  siRNA target sequence for Alg8 (NM_199035.1,664-682).
cttcactgcaagtaaacca

SEQ ID NO: 815915 - DNA, 19 bp, Mus musculus
  siRNA target sequence for Alg8 (NM_199035.1,709-727).
cagcgttgtccgagttact

SEQ ID NO: 815916 - DNA, 19 bp, Mus musculus
  siRNA target sequence for Alg8 (NM_199035.1,739-757).
gatcgtgttcctagtttct

SEQ ID NO: 815917 - DNA, 19 bp, Mus musculus
  siRNA target sequence for Alg8 (NM_199035.1,810-828).
cccgactctttcctttcaa

SEQ ID NO: 815918 - DNA, 19 bp, Mus musculus
  siRNA target sequence for Alg8 (NM_199035.1,812-830).
cgactctttcctttcaaga

SEQ ID NO: 815919 - DNA, 19 bp, Mus musculus
  siRNA target sequence for Alg8 (NM_199035.1,867-885).
gggctttgtacaatgcttt

SEQ ID NO: 815920 - DNA, 19 bp, Mus musculus
  siRNA target sequence for Alg8 (NM_199035.1,887-905).
gacaaagtactgtctgtaa

SEQ ID NO: 815921 - DNA, 19 bp, Mus musculus
  siRNA target sequence for Alg8 (NM_199035.1,889-907).
caaagtactgtctgtaatt

SEQ ID NO: 815922 - DNA, 19 bp, Mus musculus
  siRNA target sequence for Alg8 (NM_199035.1,893-911).
gtactgtctgtaattggtt

SEQ ID NO: 815923 - DNA, 19 bp, Mus musculus
  siRNA target sequence for Alg8 (NM_199035.1,1041-1059).
ccatattgccctctgtttt

SEQ ID NO: 815924 - DNA, 19 bp, Mus musculus
  siRNA target sequence for Alg8 (NM_199035.1,1273-1291).
cttcactgcaccagaactt

SEQ ID NO: 815925 - DNA, 19 bp, Mus musculus
  siRNA target sequence for LOC382105 (NM_199036.1,276-294).
ccgtgcaaaggcaaaagat

SEQ ID NO: 815926 - DNA, 19 bp, Mus musculus
  siRNA target sequence for LOC382105 (NM_199036.1,321-339).
gtgtggactttttggatat

SEQ ID NO: 815927 - DNA, 19 bp, Mus musculus
  siRNA target sequence for LOC382105 (NM_199036.1,325-343).
ggactttttggatatgcat

SEQ ID NO: 815928 - DNA, 19 bp, Mus musculus
  siRNA target sequence for LOC382105 (NM_199036.1,1036-1054).
gcaagcttcgagttacaat

SEQ ID NO: 815929 - DNA, 19 bp, Mus musculus
  siRNA target sequence for LOC382105 (NM_199036.1,1040-1058).
gcttcgagttacaatgtca

SEQ ID NO: 815930 - DNA, 19 bp, Mus musculus
  siRNA target sequence for LOC382105 (NM_199036.1,1289-1307).
gttatcgactgcacattga

SEQ ID NO: 815931 - DNA, 19 bp, Mus musculus
  siRNA target sequence for LOC382105 (NM_199036.1,1319-1337).
cactgtacggcttcattta

SEQ ID NO: 815932 - DNA, 19 bp, Mus musculus
  siRNA target sequence for LOC382105 (NM_199036.1,1323-1341).
gtacggcttcatttataaa

SEQ ID NO: 815933 - DNA, 19 bp, Mus musculus
  siRNA target sequence for LOC382105 (NM_199036.1,1395-1413).
cagctctctgacttcatat

SEQ ID NO: 815934 - DNA, 19 bp, Mus musculus
  siRNA target sequence for 5430438D01Rik (NM_199055.1,91-109).
cttctgctcttcatgtact

SEQ ID NO: 815935 - DNA, 19 bp, Mus musculus
  siRNA target sequence for 5430438D01Rik (NM_199055.1,105-123).
gtacttgcaagcatggatt

SEQ ID NO: 815936 - DNA, 19 bp, Mus musculus
  siRNA target sequence for 5430438D01Rik (NM_199055.1,300-318).
gaagatcagccattcacaa

SEQ ID NO: 815937 - DNA, 19 bp, Mus musculus
  siRNA target sequence for 5430438D01Rik (NM_199055.1,349-367).
gcacatcaaggagctaaaa

SEQ ID NO: 815938 - DNA, 19 bp, Mus musculus
  siRNA target sequence for 5430438D01Rik (NM_199055.1,350-368).
cacatcaaggagctaaaat

SEQ ID NO: 815939 - DNA, 19 bp, Mus musculus
  siRNA target sequence for 5430438D01Rik (NM_199055.1,411-429).
cactcagcccttaaacaaa

SEQ ID NO: 815940 - DNA, 19 bp, Mus musculus
  siRNA target sequence for 5430438D01Rik (NM_199055.1,477-495).
gaagcgtcggtcattcctt

SEQ ID NO: 815941 - DNA, 19 bp, Mus musculus
  siRNA target sequence for 5430438D01Rik (NM_199055.1,496-514).
catgagttttgcaagaaat

SEQ ID NO: 815942 - DNA, 19 bp, Mus musculus
  siRNA target sequence for 5430438D01Rik (NM_199055.1,501-519).
gttttgcaagaaatatggt

SEQ ID NO: 815943 - DNA, 19 bp, Mus musculus
  siRNA target sequence for 5430438D01Rik (NM_199055.1,529-547).
gatcccaagttcaaccttt

SEQ ID NO: 815944 - DNA, 19 bp, Mus musculus
  siRNA target sequence for 5430438D01Rik (NM_199055.1,534-552).
caagttcaacctttttcat

SEQ ID NO: 815945 - DNA, 19 bp, Mus musculus
  siRNA target sequence for 5430438D01Rik (NM_199055.1,550-568).
catatagtatctaggatat

SEQ ID NO: 815946 - DNA, 19 bp, Mus musculus
  siRNA target sequence for 5430438D01Rik (NM_199055.1,597-615).
ctgtgaagtaccaaaagct

SEQ ID NO: 815947 - DNA, 19 bp, Mus musculus
  siRNA target sequence for 5430438D01Rik (NM_199055.1,660-678).
ggcttcctctgcatacaat

SEQ ID NO: 815948 - DNA, 19 bp, Mus musculus
  siRNA target sequence for 5430438D01Rik (NM_199055.1,675-693).
caatatctcccatgatact

SEQ ID NO: 815949 - DNA, 19 bp, Mus musculus
  siRNA target sequence for 5430438D01Rik (NM_199055.1,745-763).
gtacacatgcgtttgaata

SEQ ID NO: 815950 - DNA, 19 bp, Mus musculus
  siRNA target sequence for 5430438D01Rik (NM_199055.1,748-766).
cacatgcgtttgaatacat

SEQ ID NO: 815951 - DNA, 19 bp, Mus musculus
  siRNA target sequence for 5430438D01Rik (NM_199055.1,754-772).
cgtttgaatacatatacca

SEQ ID NO: 815952 - DNA, 19 bp, Mus musculus
  siRNA target sequence for 5430438D01Rik (NM_199055.1,755-773).
gtttgaatacatataccaa

SEQ ID NO: 815953 - DNA, 19 bp, Mus musculus
  siRNA target sequence for 5430438D01Rik (NM_199055.1,788-806).
gagatcccatggaaagatt

SEQ ID NO: 815954 - DNA, 19 bp, Mus musculus
  siRNA target sequence for 5430438D01Rik (NM_199055.1,810-828).
ctccgcatttagggataaa

SEQ ID NO: 815955 - DNA, 19 bp, Mus musculus
  siRNA target sequence for 5430438D01Rik (NM_199055.1,812-830).
ccgcatttagggataaatt

SEQ ID NO: 815956 - DNA, 19 bp, Mus musculus
  siRNA target sequence for 5430438D01Rik (NM_199055.1,813-831).
cgcatttagggataaattt

SEQ ID NO: 815957 - DNA, 19 bp, Mus musculus
  siRNA target sequence for 5430438D01Rik (NM_199055.1,832-850).
gagcatcccaatagttact

SEQ ID NO: 815958 - DNA, 19 bp, Mus musculus
  siRNA target sequence for 5430438D01Rik (NM_199055.1,859-877).
gtgtttggaaaggcaatta

SEQ ID NO: 815959 - DNA, 19 bp, Mus musculus
  siRNA target sequence for 5430438D01Rik (NM_199055.1,866-884).
gaaaggcaattatcaagaa

SEQ ID NO: 815960 - DNA, 19 bp, Mus musculus
  siRNA target sequence for 5430438D01Rik (NM_199055.1,968-986).
ctcaccgtccagtaggaat

SEQ ID NO: 815961 - DNA, 19 bp, Mus musculus
  siRNA target sequence for 5430438D01Rik (NM_199055.1,972-990).
ccgtccagtaggaatggat

SEQ ID NO: 815962 - DNA, 19 bp, Mus musculus
  siRNA target sequence for 5430438D01Rik (NM_199055.1,1015-1033).
ctgtgttatccgtgtttga

SEQ ID NO: 815963 - DNA, 19 bp, Mus musculus
  siRNA target sequence for 5430438D01Rik (NM_199055.1,1019-1037).
gttatccgtgtttgatcaa

SEQ ID NO: 815964 - DNA, 19 bp, Mus musculus
  siRNA target sequence for 5430438D01Rik (NM_199055.1,1032-1050).
gatcaactatgactttgta

SEQ ID NO: 815965 - DNA, 19 bp, Mus musculus
  siRNA target sequence for 5430438D01Rik (NM_199055.1,1069-1087).
ggagaggatgccaattact

SEQ ID NO: 815966 - DNA, 19 bp, Mus musculus
  siRNA target sequence for 5430438D01Rik (NM_199055.1,1070-1088).
gagaggatgccaattactt

SEQ ID NO: 815967 - DNA, 19 bp, Mus musculus
  siRNA target sequence for 5430438D01Rik (NM_199055.1,1074-1092).
ggatgccaattactttcta

SEQ ID NO: 815968 - DNA, 19 bp, Mus musculus
  siRNA target sequence for 5430438D01Rik (NM_199055.1,1143-1161).
gcactcctctgatgaaaga

SEQ ID NO: 815969 - DNA, 19 bp, Mus musculus
  siRNA target sequence for 5430438D01Rik (NM_199055.1,1171-1189).
cacgtggtaaggcagtatt

SEQ ID NO: 815970 - DNA, 19 bp, Mus musculus
  siRNA target sequence for 5430438D01Rik (NM_199055.1,1208-1226).
ccgaaagacagctcatcta

SEQ ID NO: 815971 - DNA, 19 bp, Mus musculus
  siRNA target sequence for 5430438D01Rik (NM_199055.1,1209-1227).
cgaaagacagctcatctat

SEQ ID NO: 815972 - DNA, 19 bp, Mus musculus
  siRNA target sequence for 5430438D01Rik (NM_199055.1,1214-1232).
gacagctcatctatgactt

SEQ ID NO: 815973 - DNA, 19 bp, Mus musculus
  siRNA target sequence for 5430438D01Rik (NM_199055.1,1239-1257).
cttggactatttgatgttt

SEQ ID NO: 815974 - DNA, 19 bp, Mus musculus
  siRNA target sequence for 5430438D01Rik (NM_199055.1,1243-1261).
gactatttgatgtttaatt

SEQ ID NO: 815975 - DNA, 19 bp, Mus musculus
  siRNA target sequence for 1810043M15Rik (NM_199056.1,150-168).
cgcgcagcgctgtgtagtt

SEQ ID NO: 815976 - DNA, 19 bp, Mus musculus
  siRNA target sequence for 1810043M15Rik (NM_199056.1,152-170).
cgcagcgctgtgtagttct

SEQ ID NO: 815977 - DNA, 19 bp, Mus musculus
  siRNA target sequence for 1810043M15Rik (NM_199056.1,204-222).
gacctcagaagagatactt

SEQ ID NO: 815978 - DNA, 19 bp, Mus musculus
  siRNA target sequence for 1810043M15Rik (NM_199056.1,231-249).
gcagaacatagtagacttt

SEQ ID NO: 815979 - DNA, 19 bp, Mus musculus
  siRNA target sequence for 1810043M15Rik (NM_199056.1,270-288).
ctttttgggagagaactat

SEQ ID NO: 815980 - DNA, 19 bp, Mus musculus
  siRNA target sequence for 1810043M15Rik (NM_199056.1,313-331).
ctgcctttagagtttgtga

SEQ ID NO: 815981 - DNA, 19 bp, Mus musculus
  siRNA target sequence for 1810043M15Rik (NM_199056.1,328-346).
gtgaaacaactctgtttaa

SEQ ID NO: 815982 - DNA, 19 bp, Mus musculus
  siRNA target sequence for 1810043M15Rik (NM_199056.1,390-408).
ggacacattcagtggttat

SEQ ID NO: 815983 - DNA, 19 bp, Mus musculus
  siRNA target sequence for 1810043M15Rik (NM_199056.1,508-526).
cctttctcaaatgatgtta

SEQ ID NO: 815984 - DNA, 19 bp, Mus musculus
  siRNA target sequence for 1810043M15Rik (NM_199056.1,625-643).
gacctctactcaggaaata

SEQ ID NO: 815985 - DNA, 19 bp, Mus musculus
  siRNA target sequence for 1810043M15Rik (NM_199056.1,715-733).
ggagagctgatttatggtt

SEQ ID NO: 815986 - DNA, 19 bp, Mus musculus
  siRNA target sequence for 1810043M15Rik (NM_199056.1,850-868).
cgtgagctggtgcatgtta

SEQ ID NO: 815987 - DNA, 19 bp, Mus musculus
  siRNA target sequence for 1810043M15Rik (NM_199056.1,851-869).
gtgagctggtgcatgttat

SEQ ID NO: 815988 - DNA, 19 bp, Mus musculus
  siRNA target sequence for 1810043M15Rik (NM_199056.1,971-989).
gcctacacaaccaaggaaa

SEQ ID NO: 815989 - DNA, 19 bp, Mus musculus
  siRNA target sequence for 1810043M15Rik (NM_199056.1,1149-1167).
gatagatgggccttatgat

SEQ ID NO: 815990 - DNA, 19 bp, Mus musculus
  siRNA target sequence for 1810043M15Rik (NM_199056.1,1290-1308).
cgcactttccccttgtcta

SEQ ID NO: 815991 - DNA, 19 bp, Mus musculus
  siRNA target sequence for 1810043M15Rik (NM_199056.1,1322-1340).
ctgaccagaggcctgttat

SEQ ID NO: 815992 - DNA, 19 bp, Mus musculus
  siRNA target sequence for 1810043M15Rik (NM_199056.1,1326-1344).
ccagaggcctgttattcct

SEQ ID NO: 815993 - DNA, 19 bp, Mus musculus
  siRNA target sequence for 1810043M15Rik (NM_199056.1,1434-1452).
cagcaagatagtcaactat

SEQ ID NO: 815994 - DNA, 19 bp, Mus musculus
  siRNA target sequence for 1810043M15Rik (NM_199056.1,1444-1462).
gtcaactattactcaaaga

SEQ ID NO: 815995 - DNA, 19 bp, Mus musculus
  siRNA target sequence for 1810043M15Rik (NM_199056.1,1520-1538).
gcacattagttctccataa

SEQ ID NO: 815996 - DNA, 19 bp, Mus musculus
  siRNA target sequence for Gpr6 (NM_199058.1,371-389).
gtggcctcatcttacactt

SEQ ID NO: 815997 - DNA, 19 bp, Mus musculus
  siRNA target sequence for Gpr6 (NM_199058.1,719-737).
gcatcatgctgcacttgta

SEQ ID NO: 815998 - DNA, 19 bp, Mus musculus
  siRNA target sequence for Gpr6 (NM_199058.1,882-900).
gcccttcgccatctattgt

SEQ ID NO: 815999 - DNA, 19 bp, Mus musculus
  siRNA target sequence for Gpr6 (NM_199058.1,884-902).
ccttcgccatctattgtgt

SEQ ID NO: 816000 - DNA, 19 bp, Mus musculus
  siRNA target sequence for Trf3 (NM_199059.1,166-184).
ccaggagtgcctttagaca

SEQ ID NO: 816001 - DNA, 19 bp, Mus musculus
  siRNA target sequence for Trf3 (NM_199059.1,167-185).
caggagtgcctttagacat

SEQ ID NO: 816002 - DNA, 19 bp, Mus musculus
  siRNA target sequence for Trf3 (NM_199059.1,186-204).
gcactcacttccatctaat

SEQ ID NO: 816003 - DNA, 19 bp, Mus musculus
  siRNA target sequence for Trf3 (NM_199059.1,189-207).
ctcacttccatctaatcca

SEQ ID NO: 816004 - DNA, 19 bp, Mus musculus
  siRNA target sequence for Trf3 (NM_199059.1,226-244).
catcttggtggagtcaaaa

SEQ ID NO: 816005 - DNA, 19 bp, Mus musculus
  siRNA target sequence for Trf3 (NM_199059.1,247-265).
gcatccactgacttttcat

SEQ ID NO: 816006 - DNA, 19 bp, Mus musculus
  siRNA target sequence for Trf3 (NM_199059.1,263-281).
catctgtggatctaagctt

SEQ ID NO: 816007 - DNA, 19 bp, Mus musculus
  siRNA target sequence for Trf3 (NM_199059.1,279-297).
cttcttaccagatgaactt

SEQ ID NO: 816008 - DNA, 19 bp, Mus musculus
  siRNA target sequence for Trf3 (NM_199059.1,360-378).
gactcgagatcgacaaagt

SEQ ID NO: 816009 - DNA, 19 bp, Mus musculus
  siRNA target sequence for Trf3 (NM_199059.1,362-380).
ctcgagatcgacaaagtca

SEQ ID NO: 816010 - DNA, 19 bp, Mus musculus
  siRNA target sequence for Trf3 (NM_199059.1,405-423).
cagtgagctgaacttgaat

SEQ ID NO: 816011 - DNA, 19 bp, Mus musculus
  siRNA target sequence for Trf3 (NM_199059.1,409-427).
gagctgaacttgaatagca

SEQ ID NO: 816012 - DNA, 19 bp, Mus musculus
  siRNA target sequence for Trf3 (NM_199059.1,517-535).
cctgtggcattgatagcat

SEQ ID NO: 816013 - DNA, 19 bp, Mus musculus
  siRNA target sequence for Trf3 (NM_199059.1,579-597).
gcctcaattacagaatgta

SEQ ID NO: 816014 - DNA, 19 bp, Mus musculus
  siRNA target sequence for Trf3 (NM_199059.1,583-601).
caattacagaatgtagttt

SEQ ID NO: 816015 - DNA, 19 bp, Mus musculus
  siRNA target sequence for Trf3 (NM_199059.1,607-625).
gcaaatctggcctgtaaat

SEQ ID NO: 816016 - DNA, 19 bp, Mus musculus
  siRNA target sequence for Trf3 (NM_199059.1,620-638).
gtaaattggatctgagaaa

SEQ ID NO: 816017 - DNA, 19 bp, Mus musculus
  siRNA target sequence for Trf3 (NM_199059.1,643-661).
gccctgaatgccaaaaaca

SEQ ID NO: 816018 - DNA, 19 bp, Mus musculus
  siRNA target sequence for Trf3 (NM_199059.1,678-696).
gaggtttgctgcagtaata

SEQ ID NO: 816019 - DNA, 19 bp, Mus musculus
  siRNA target sequence for Trf3 (NM_199059.1,680-698).
ggtttgctgcagtaataat

SEQ ID NO: 816020 - DNA, 19 bp, Mus musculus
  siRNA target sequence for Trf3 (NM_199059.1,753-771).
ctgtacaggagccaaaagt

SEQ ID NO: 816021 - DNA, 19 bp, Mus musculus
  siRNA target sequence for Trf3 (NM_199059.1,827-845).
ggttccctgtcagattctt

SEQ ID NO: 816022 - DNA, 19 bp, Mus musculus
  siRNA target sequence for Trf3 (NM_199059.1,832-850).
cctgtcagattcttcaatt

SEQ ID NO: 816023 - DNA, 19 bp, Mus musculus
  siRNA target sequence for Trf3 (NM_199059.1,927-945).
gcagttcagtagcagttat

SEQ ID NO: 816024 - DNA, 19 bp, Mus musculus
  siRNA target sequence for Trf3 (NM_199059.1,993-1011).
ggttgtgttgctaatcttt

SEQ ID NO: 816025 - DNA, 19 bp, Mus musculus
  siRNA target sequence for Trf3 (NM_199059.1,1080-1098).
gtatcctattctagaaagt

SEQ ID NO: 816026 - DNA, 19 bp, Mus musculus
  siRNA target sequence for LOC387334 (NM_199067.1,138-156).
cagtcaccctggtacattt

SEQ ID NO: 816027 - DNA, 19 bp, Mus musculus
  siRNA target sequence for LOC387334 (NM_199067.1,140-158).
gtcaccctggtacatttca

SEQ ID NO: 816028 - DNA, 19 bp, Mus musculus
  siRNA target sequence for LOC387334 (NM_199067.1,157-175).
cacgtcaggatcaagtgta

SEQ ID NO: 816029 - DNA, 19 bp, Mus musculus
  siRNA target sequence for LOC387334 (NM_199067.1,190-208).
gctgtttttggtgacaatt

SEQ ID NO: 816030 - DNA, 19 bp, Mus musculus
  siRNA target sequence for LOC387334 (NM_199067.1,224-242).
gcatgggtgatctctgtaa

SEQ ID NO: 816031 - DNA, 19 bp, Mus musculus
  siRNA target sequence for LOC387334 (NM_199067.1,229-247).
ggtgatctctgtaataata

SEQ ID NO: 816032 - DNA, 19 bp, Mus musculus
  siRNA target sequence for LOC387334 (NM_199067.1,232-250).
gatctctgtaataatacga

SEQ ID NO: 816033 - DNA, 19 bp, Mus musculus
  siRNA target sequence for LOC387334 (NM_199067.1,235-253).
ctctgtaataatacgaaat

SEQ ID NO: 816034 - DNA, 19 bp, Mus musculus
  siRNA target sequence for 2610007K22Rik (NM_199079.1,1520-1538).
gggctaggtttgtatagat

SEQ ID NO: 816035 - DNA, 19 bp, Mus musculus
  siRNA target sequence for Znrf2 (NM_199143.1,544-562).
gcacttgtttggaggattt

SEQ ID NO: 816036 - DNA, 19 bp, Mus musculus
  siRNA target sequence for Znrf2 (NM_199143.1,565-583).
gtgcccggtatgctcaaaa

SEQ ID NO: 816037 - DNA, 19 bp, Mus musculus
  siRNA target sequence for Znrf2 (NM_199143.1,567-585).
gcccggtatgctcaaaatt

SEQ ID NO: 816038 - DNA, 19 bp, Mus musculus
  siRNA target sequence for Znrf2 (NM_199143.1,568-586).
cccggtatgctcaaaattt

SEQ ID NO: 816039 - DNA, 19 bp, Mus musculus
  siRNA target sequence for Znrf2 (NM_199143.1,590-608).
ccctcagatgaaatggatt

SEQ ID NO: 816040 - DNA, 19 bp, Mus musculus
  siRNA target sequence for Znrf2 (NM_199143.1,684-702).
gtgcaatatgccttgaaga

SEQ ID NO: 816041 - DNA, 19 bp, Mus musculus
  siRNA target sequence for Znrf2 (NM_199143.1,739-757).
cctgtgtatatatcataaa

SEQ ID NO: 816042 - DNA, 19 bp, Mus musculus
  siRNA target sequence for Znrf2 (NM_199143.1,759-777).
gctgcatagatgaatggtt

SEQ ID NO: 816043 - DNA, 19 bp, Mus musculus
  siRNA target sequence for Znrf2 (NM_199143.1,770-788).
gaatggtttgaagtcaata

SEQ ID NO: 816044 - DNA, 19 bp, Mus musculus
  siRNA target sequence for LOC209387 (NM_199146.1,387-405).
gagttccttacctgtttga

SEQ ID NO: 816045 - DNA, 19 bp, Mus musculus
  siRNA target sequence for LOC209387 (NM_199146.1,739-757).
cagtgatatagaagacatt

SEQ ID NO: 816046 - DNA, 19 bp, Mus musculus
  siRNA target sequence for LOC209387 (NM_199146.1,741-759).
gtgatatagaagacattca

SEQ ID NO: 816047 - DNA, 19 bp, Mus musculus
  siRNA target sequence for LOC209387 (NM_199146.1,749-767).
gaagacattcagatagagt

SEQ ID NO: 816048 - DNA, 19 bp, Mus musculus
  siRNA target sequence for LOC209387 (NM_199146.1,754-772).
cattcagatagagtttaat

SEQ ID NO: 816049 - DNA, 19 bp, Mus musculus
  siRNA target sequence for LOC209387 (NM_199146.1,912-930).
catatgttcagcatcagtt

SEQ ID NO: 816050 - DNA, 19 bp, Mus musculus
  siRNA target sequence for LOC209387 (NM_199146.1,1444-1462).
gaattcatctgtatacaat

SEQ ID NO: 816051 - DNA, 19 bp, Mus musculus
  siRNA target sequence for LOC209387 (NM_199146.1,1591-1609).
ctctggagctctcatctat

SEQ ID NO: 816052 - DNA, 19 bp, Mus musculus
  siRNA target sequence for MGC70158 (NM_199147.1,159-177).
gtctgaagtgagcaatcaa

SEQ ID NO: 816053 - DNA, 19 bp, Mus musculus
  siRNA target sequence for MGC70158 (NM_199147.1,161-179).
ctgaagtgagcaatcaagt

SEQ ID NO: 816054 - DNA, 19 bp, Mus musculus
  siRNA target sequence for MGC70158 (NM_199147.1,181-199).
ctccttcgatactaccaaa

SEQ ID NO: 816055 - DNA, 19 bp, Mus musculus
  siRNA target sequence for MGC70158 (NM_199147.1,236-254).
caaccatccgcctgttaga

SEQ ID NO: 816056 - DNA, 19 bp, Mus musculus
  siRNA target sequence for MGC70158 (NM_199147.1,278-296).
ctcacgctcgcctgatgtt

SEQ ID NO: 816057 - DNA, 19 bp, Mus musculus
  siRNA target sequence for MGC70158 (NM_199147.1,526-544).
caccaatgccagtcacatt

SEQ ID NO: 816058 - DNA, 19 bp, Mus musculus
  siRNA target sequence for MGC70158 (NM_199147.1,528-546).
ccaatgccagtcacattca

SEQ ID NO: 816059 - DNA, 19 bp, Mus musculus
  siRNA target sequence for MGC70158 (NM_199147.1,598-616).
ccaaggctcaggacttcaa

SEQ ID NO: 816060 - DNA, 19 bp, Mus musculus
  siRNA target sequence for MGC70158 (NM_199147.1,675-693).
gcctggtccagggcttaat

SEQ ID NO: 816061 - DNA, 19 bp, Mus musculus
  siRNA target sequence for MGC70158 (NM_199147.1,676-694).
cctggtccagggcttaata

SEQ ID NO: 816062 - DNA, 19 bp, Mus musculus
  siRNA target sequence for MGC70158 (NM_199147.1,687-705).
gcttaatagaccaacaagt

SEQ ID NO: 816063 - DNA, 19 bp, Mus musculus
  siRNA target sequence for MGC70158 (NM_199147.1,688-706).
cttaatagaccaacaagtt

SEQ ID NO: 816064 - DNA, 19 bp, Mus musculus
  siRNA target sequence for MGC70158 (NM_199147.1,697-715).
ccaacaagttgtaacaact

SEQ ID NO: 816065 - DNA, 19 bp, Mus musculus
  siRNA target sequence for MGC70158 (NM_199147.1,734-752).
gcagaggtgacggtttaga

SEQ ID NO: 816066 - DNA, 19 bp, Mus musculus
  siRNA target sequence for MGC70158 (NM_199147.1,756-774).
gttggaccccacatcaagt

SEQ ID NO: 816067 - DNA, 19 bp, Mus musculus
  siRNA target sequence for MGC70158 (NM_199147.1,990-1008).
ggcagtggttgtatctgaa

SEQ ID NO: 816068 - DNA, 19 bp, Mus musculus
  siRNA target sequence for MGC70158 (NM_199147.1,1066-1084).
gaggggtcacagaatgtgt

SEQ ID NO: 816069 - DNA, 19 bp, Mus musculus
  siRNA target sequence for MGC70158 (NM_199147.1,1318-1336).
cctcccagtgctagtgaaa

SEQ ID NO: 816070 - DNA, 19 bp, Mus musculus
  siRNA target sequence for MGC70158 (NM_199147.1,1479-1497).
gcagccaccagacagtaat

SEQ ID NO: 816071 - DNA, 19 bp, Mus musculus
  siRNA target sequence for MGC70158 (NM_199147.1,1524-1542).
ccccaaaagaagggttatt

SEQ ID NO: 816072 - DNA, 19 bp, Mus musculus
  siRNA target sequence for MGC70158 (NM_199147.1,1612-1630).
ggggtttcctgcggtaata

SEQ ID NO: 816073 - DNA, 19 bp, Mus musculus
  siRNA target sequence for MGC70158 (NM_199147.1,1613-1631).
gggtttcctgcggtaataa

SEQ ID NO: 816074 - DNA, 19 bp, Mus musculus
  siRNA target sequence for MGC70158 (NM_199147.1,1614-1632).
ggtttcctgcggtaataaa

SEQ ID NO: 816075 - DNA, 19 bp, Mus musculus
  siRNA target sequence for MGC70158 (NM_199147.1,1615-1633).
gtttcctgcggtaataaaa

SEQ ID NO: 816076 - DNA, 19 bp, Mus musculus
  siRNA target sequence for MGC70158 (NM_199147.1,1669-1687).
gcaagcttctccttcactt

SEQ ID NO: 816077 - DNA, 19 bp, Mus musculus
  siRNA target sequence for MGC70158 (NM_199147.1,1836-1854).
cacagagagagcgaatctt

SEQ ID NO: 816078 - DNA, 19 bp, Mus musculus
  siRNA target sequence for MGC70158 (NM_199147.1,1872-1890).
cactctgtcggaactagat

SEQ ID NO: 816079 - DNA, 19 bp, Mus musculus
  siRNA target sequence for MGC70158 (NM_199147.1,1888-1906).
gatgacgaagcattagatt

SEQ ID NO: 816080 - DNA, 19 bp, Mus musculus
  siRNA target sequence for LOC218275 (NM_199148.1,468-486).
gggtcattgtggatcttgt

SEQ ID NO: 816081 - DNA, 19 bp, Mus musculus
  siRNA target sequence for LOC218275 (NM_199148.1,513-531).
ggaaggacaaatattcaga

SEQ ID NO: 816082 - DNA, 19 bp, Mus musculus
  siRNA target sequence for LOC218275 (NM_199148.1,668-686).
gggagtcctacgcatatga

SEQ ID NO: 816083 - DNA, 19 bp, Mus musculus
  siRNA target sequence for LOC218275 (NM_199148.1,669-687).
ggagtcctacgcatatgaa

SEQ ID NO: 816084 - DNA, 19 bp, Mus musculus
  siRNA target sequence for LOC218275 (NM_199148.1,704-722).
gcaggtacgatcctaagta

SEQ ID NO: 816085 - DNA, 19 bp, Mus musculus
  siRNA target sequence for LOC218275 (NM_199148.1,849-867).
cagaggtggtacgtactat

SEQ ID NO: 816086 - DNA, 19 bp, Mus musculus
  siRNA target sequence for LOC218275 (NM_199148.1,851-869).
gaggtggtacgtactatga

SEQ ID NO: 816087 - DNA, 19 bp, Mus musculus
  siRNA target sequence for LOC232947 (NM_199149.1,734-752).
gggagaagcttgattataa

SEQ ID NO: 816088 - DNA, 19 bp, Mus musculus
  siRNA target sequence for LOC232947 (NM_199149.1,807-825).
cctggagcaaaccaactta

SEQ ID NO: 816089 - DNA, 19 bp, Mus musculus
  siRNA target sequence for LOC232947 (NM_199149.1,842-860).
cagccctctttgacatgat

SEQ ID NO: 816090 - DNA, 19 bp, Mus musculus
  siRNA target sequence for LOC232947 (NM_199149.1,845-863).
ccctctttgacatgattga

SEQ ID NO: 816091 - DNA, 19 bp, Mus musculus
  siRNA target sequence for LOC232947 (NM_199149.1,847-865).
ctctttgacatgattgagt

SEQ ID NO: 816092 - DNA, 19 bp, Mus musculus
  siRNA target sequence for LOC232947 (NM_199149.1,875-893).
cggccacccacctcaacat

SEQ ID NO: 816093 - DNA, 19 bp, Mus musculus
  siRNA target sequence for LOC232947 (NM_199149.1,1051-1069).
gcagtgctgcacctagaaa

SEQ ID NO: 816094 - DNA, 19 bp, Mus musculus
  siRNA target sequence for LOC232947 (NM_199149.1,1052-1070).
cagtgctgcacctagaaaa

SEQ ID NO: 816095 - DNA, 19 bp, Mus musculus
  siRNA target sequence for LOC232947 (NM_199149.1,1209-1227).
caactgctccctgcaaatt

SEQ ID NO: 816096 - DNA, 19 bp, Mus musculus
  siRNA target sequence for LOC232947 (NM_199149.1,1424-1442).
ggaacgagggtgtacgaaa

SEQ ID NO: 816097 - DNA, 19 bp, Mus musculus
  siRNA target sequence for LOC232947 (NM_199149.1,1576-1594).
cgggaaaacgagatcaaga

SEQ ID NO: 816098 - DNA, 19 bp, Mus musculus
  siRNA target sequence for LOC232947 (NM_199149.1,1734-1752).
cggctgcaagcgcaacttt

SEQ ID NO: 816099 - DNA, 19 bp, Mus musculus
  siRNA target sequence for LOC232947 (NM_199149.1,1736-1754).
gctgcaagcgcaactttgt

SEQ ID NO: 816100 - DNA, 19 bp, Mus musculus
  siRNA target sequence for LOC232947 (NM_199149.1,2089-2107).
cccactgagcagcgtattt

SEQ ID NO: 816101 - DNA, 19 bp, Mus musculus
  siRNA target sequence for LOC232947 (NM_199149.1,2093-2111).
ctgagcagcgtatttctgt

SEQ ID NO: 816102 - DNA, 19 bp, Mus musculus
  siRNA target sequence for LOC232947 (NM_199149.1,2126-2144).
gaggccacaaggtatttgt

SEQ ID NO: 816103 - DNA, 19 bp, Mus musculus
  siRNA target sequence for Gtf2a2 (NM_199151.1,104-122).
cctatcagttatacagaaa

SEQ ID NO: 816104 - DNA, 19 bp, Mus musculus
  siRNA target sequence for Gtf2a2 (NM_199151.1,152-170).
gccttgatgagctcataca

SEQ ID NO: 816105 - DNA, 19 bp, Mus musculus
  siRNA target sequence for Gtf2a2 (NM_199151.1,188-206).
cccagcttgcgcttcaagt

SEQ ID NO: 816106 - DNA, 19 bp, Mus musculus
  siRNA target sequence for Gtf2a2 (NM_199151.1,197-215).
cgcttcaagttctacttca

SEQ ID NO: 816107 - DNA, 19 bp, Mus musculus
  siRNA target sequence for Gtf2a2 (NM_199151.1,205-223).
gttctacttcagtttgata

SEQ ID NO: 816108 - DNA, 19 bp, Mus musculus
  siRNA target sequence for Gtf2a2 (NM_199151.1,211-229).
cttcagtttgataaagcta

SEQ ID NO: 816109 - DNA, 19 bp, Mus musculus
  siRNA target sequence for Gtf2a2 (NM_199151.1,214-232).
cagtttgataaagctataa

SEQ ID NO: 816110 - DNA, 19 bp, Mus musculus
  siRNA target sequence for Gtf2a2 (NM_199151.1,253-271).
gtcaggaacagagtcaatt

SEQ ID NO: 816111 - DNA, 19 bp, Mus musculus
  siRNA target sequence for Gtf2a2 (NM_199151.1,326-344).
cgtacgtggacttaactca

SEQ ID NO: 816112 - DNA, 19 bp, Mus musculus
  siRNA target sequence for Gtf2a2 (NM_199151.1,345-363).
ccatagcaagatttggtta

SEQ ID NO: 816113 - DNA, 19 bp, Mus musculus
  siRNA target sequence for Gtf2a2 (NM_199151.1,369-387).
gtttgggaacttgttctat

SEQ ID NO: 816114 - DNA, 19 bp, Mus musculus
  siRNA target sequence for Gtf2a2 (NM_199151.1,375-393).
gaacttgttctataatcgt

SEQ ID NO: 816115 - DNA, 19 bp, Mus musculus
  siRNA target sequence for Gtf2a2 (NM_199151.1,398-416).
ctaagttcatccattccat

SEQ ID NO: 816116 - DNA, 19 bp, Mus musculus
  siRNA target sequence for Obscn (NM_199152.1,199-217).
ccgccagggccacttcata

SEQ ID NO: 816117 - DNA, 19 bp, Mus musculus
  siRNA target sequence for Obscn (NM_199152.1,203-221).
cagggccacttcatagtgt

SEQ ID NO: 816118 - DNA, 19 bp, Mus musculus
  siRNA target sequence for Obscn (NM_199152.1,465-483).
cacggaccgtcatcatcaa

SEQ ID NO: 816119 - DNA, 19 bp, Mus musculus
  siRNA target sequence for Obscn (NM_199152.1,540-558).
ggcgtccccctgagtttga

SEQ ID NO: 816120 - DNA, 19 bp, Mus musculus
  siRNA target sequence for Obscn (NM_199152.1,541-559).
gcgtccccctgagtttgaa

SEQ ID NO: 816121 - DNA, 19 bp, Mus musculus
  siRNA target sequence for Obscn (NM_199152.1,543-561).
gtccccctgagtttgaaga

SEQ ID NO: 816122 - DNA, 19 bp, Mus musculus
  siRNA target sequence for Obscn (NM_199152.1,624-642).
gcacacctaagcctattgt

SEQ ID NO: 816123 - DNA, 19 bp, Mus musculus
  siRNA target sequence for Obscn (NM_199152.1,798-816).
gcaccttggggaagattct

SEQ ID NO: 816124 - DNA, 19 bp, Mus musculus
  siRNA target sequence for Obscn (NM_199152.1,799-817).
caccttggggaagattcta

SEQ ID NO: 816125 - DNA, 19 bp, Mus musculus
  siRNA target sequence for Obscn (NM_199152.1,805-823).
ggggaagattctagtacaa

SEQ ID NO: 816126 - DNA, 19 bp, Mus musculus
  siRNA target sequence for Obscn (NM_199152.1,807-825).
ggaagattctagtacaagt

SEQ ID NO: 816127 - DNA, 19 bp, Mus musculus
  siRNA target sequence for Obscn (NM_199152.1,824-842).
gtgcccccacggtttgtga

SEQ ID NO: 816128 - DNA, 19 bp, Mus musculus
  siRNA target sequence for Obscn (NM_199152.1,828-846).
ccccacggtttgtgaacaa

SEQ ID NO: 816129 - DNA, 19 bp, Mus musculus
  siRNA target sequence for Obscn (NM_199152.1,964-982).
caggtaccggatgttgaat

SEQ ID NO: 816130 - DNA, 19 bp, Mus musculus
  siRNA target sequence for Obscn (NM_199152.1,966-984).
ggtaccggatgttgaatga

SEQ ID NO: 816131 - DNA, 19 bp, Mus musculus
  siRNA target sequence for Obscn (NM_199152.1,967-985).
gtaccggatgttgaatgaa

SEQ ID NO: 816132 - DNA, 19 bp, Mus musculus
  siRNA target sequence for Obscn (NM_199152.1,1085-1103).
ggtggtggagaactataca

SEQ ID NO: 816133 - DNA, 19 bp, Mus musculus
  siRNA target sequence for Tas2r102 (NM_199153.1,22-40).
ggacaggcgacgctgttat

SEQ ID NO: 816134 - DNA, 19 bp, Mus musculus
  siRNA target sequence for Tas2r102 (NM_199153.1,23-41).
gacaggcgacgctgttata

SEQ ID NO: 816135 - DNA, 19 bp, Mus musculus
  siRNA target sequence for Tas2r102 (NM_199153.1,81-99).
ctttgccactgtactaata

SEQ ID NO: 816136 - DNA, 19 bp, Mus musculus
  siRNA target sequence for Tas2r102 (NM_199153.1,86-104).
ccactgtactaatatacgt

SEQ ID NO: 816137 - DNA, 19 bp, Mus musculus
  siRNA target sequence for Tas2r102 (NM_199153.1,94-112).
ctaatatacgtggagttta

SEQ ID NO: 816138 - DNA, 19 bp, Mus musculus
  siRNA target sequence for Tas2r102 (NM_199153.1,119-137).
ggaatttgagcaatggatt

SEQ ID NO: 816139 - DNA, 19 bp, Mus musculus
  siRNA target sequence for Tas2r102 (NM_199153.1,128-146).
gcaatggattcatagtgtt

SEQ ID NO: 816140 - DNA, 19 bp, Mus musculus
  siRNA target sequence for Tas2r102 (NM_199153.1,133-151).
ggattcatagtgttgtcaa

SEQ ID NO: 816141 - DNA, 19 bp, Mus musculus
  siRNA target sequence for Tas2r102 (NM_199153.1,164-182).
gggtcattaaacaaaagct

SEQ ID NO: 816142 - DNA, 19 bp, Mus musculus
  siRNA target sequence for Tas2r102 (NM_199153.1,165-183).
ggtcattaaacaaaagctt

SEQ ID NO: 816143 - DNA, 19 bp, Mus musculus
  siRNA target sequence for Tas2r102 (NM_199153.1,193-211).
gataaaattcttcttacat

SEQ ID NO: 816144 - DNA, 19 bp, Mus musculus
  siRNA target sequence for Tas2r102 (NM_199153.1,205-223).
cttacattggcaatttcaa

SEQ ID NO: 816145 - DNA, 19 bp, Mus musculus
  siRNA target sequence for Tas2r102 (NM_199153.1,213-231).
ggcaatttcaagaatcact

SEQ ID NO: 816146 - DNA, 19 bp, Mus musculus
  siRNA target sequence for Tas2r102 (NM_199153.1,240-258).
ggaaatatatgcttggttt

SEQ ID NO: 816147 - DNA, 19 bp, Mus musculus
  siRNA target sequence for Tas2r102 (NM_199153.1,292-310).
ggaatagaatttcaaatta

SEQ ID NO: 816148 - DNA, 19 bp, Mus musculus
  siRNA target sequence for Tas2r102 (NM_199153.1,372-390).
cttttatttactcagaata

SEQ ID NO: 816149 - DNA, 19 bp, Mus musculus
  siRNA target sequence for Tas2r102 (NM_199153.1,423-441).
gaaatggagacttaaacaa

SEQ ID NO: 816150 - DNA, 19 bp, Mus musculus
  siRNA target sequence for Tas2r102 (NM_199153.1,428-446).
ggagacttaaacaactgat

SEQ ID NO: 816151 - DNA, 19 bp, Mus musculus
  siRNA target sequence for Tas2r102 (NM_199153.1,600-618).
ggctatgttctctgtaata

SEQ ID NO: 816152 - DNA, 19 bp, Mus musculus
  siRNA target sequence for Tas2r102 (NM_199153.1,803-821).
catggattgctcaaaagca

SEQ ID NO: 816153 - DNA, 19 bp, Mus musculus
  siRNA target sequence for Tas2r102 (NM_199153.1,825-843).
gagtgaactggctgatatt

SEQ ID NO: 816154 - DNA, 19 bp, Mus musculus
  siRNA target sequence for Tas2r102 (NM_199153.1,827-845).
gtgaactggctgatattat

SEQ ID NO: 816155 - DNA, 19 bp, Mus musculus
  siRNA target sequence for Tas2r102 (NM_199153.1,838-856).
gatattattggtatgataa

SEQ ID NO: 816156 - DNA, 19 bp, Mus musculus
  siRNA target sequence for Tas2r102 (NM_199153.1,848-866).
gtatgataactgaactcat

SEQ ID NO: 816157 - DNA, 19 bp, Mus musculus
  siRNA target sequence for Tas2r102 (NM_199153.1,852-870).
gataactgaactcatgtat

SEQ ID NO: 816158 - DNA, 19 bp, Mus musculus
  siRNA target sequence for Tas2r102 (NM_199153.1,902-920).
gaaattctaaattaaagca

SEQ ID NO: 816159 - DNA, 19 bp, Mus musculus
  siRNA target sequence for Tas2r102 (NM_199153.1,982-1000).
gcatatagcaaccaaataa

SEQ ID NO: 816160 - DNA, 19 bp, Mus musculus
  siRNA target sequence for Tas2r107 (NM_199154.1,123-141).
ctctaagatcggtttcatt

SEQ ID NO: 816161 - DNA, 19 bp, Mus musculus
  siRNA target sequence for Tas2r107 (NM_199154.1,125-143).
ctaagatcggtttcattct

SEQ ID NO: 816162 - DNA, 19 bp, Mus musculus
  siRNA target sequence for Tas2r107 (NM_199154.1,150-168).
cttggcgatttccagaatt

SEQ ID NO: 816163 - DNA, 19 bp, Mus musculus
  siRNA target sequence for Tas2r107 (NM_199154.1,153-171).
ggcgatttccagaattggt

SEQ ID NO: 816164 - DNA, 19 bp, Mus musculus
  siRNA target sequence for Tas2r107 (NM_199154.1,164-182).
gaattggtgttgtatggat

SEQ ID NO: 816165 - DNA, 19 bp, Mus musculus
  siRNA target sequence for Tas2r107 (NM_199154.1,197-215).
ggtatatacaagtattttt

SEQ ID NO: 816166 - DNA, 19 bp, Mus musculus
  siRNA target sequence for Tas2r107 (NM_199154.1,225-243).
gcttacctctggaaacata

SEQ ID NO: 816167 - DNA, 19 bp, Mus musculus
  siRNA target sequence for Tas2r107 (NM_199154.1,363-381).
gctgaaaaggagagtcaat

SEQ ID NO: 816168 - DNA, 19 bp, Mus musculus
  siRNA target sequence for Tas2r107 (NM_199154.1,412-430).
cttacctcatggttactat

SEQ ID NO: 816169 - DNA, 19 bp, Mus musculus
  siRNA target sequence for Tas2r107 (NM_199154.1,472-490).
caccagagaaacacatctt

SEQ ID NO: 816170 - DNA, 19 bp, Mus musculus
  siRNA target sequence for Tas2r107 (NM_199154.1,492-510).
ggtccaccagcggaaaaat

SEQ ID NO: 816171 - DNA, 19 bp, Mus musculus
  siRNA target sequence for Tas2r107 (NM_199154.1,493-511).
gtccaccagcggaaaaatt

SEQ ID NO: 816172 - DNA, 19 bp, Mus musculus
  siRNA target sequence for Tas2r107 (NM_199154.1,496-514).
caccagcggaaaaattact

SEQ ID NO: 816173 - DNA, 19 bp, Mus musculus
  siRNA target sequence for Tas2r107 (NM_199154.1,501-519).
gcggaaaaattactttctt

SEQ ID NO: 816174 - DNA, 19 bp, Mus musculus
  siRNA target sequence for Tas2r107 (NM_199154.1,502-520).
cggaaaaattactttctta

SEQ ID NO: 816175 - DNA, 19 bp, Mus musculus
  siRNA target sequence for Tas2r107 (NM_199154.1,536-554).
ccaatctgggaatcttttt

SEQ ID NO: 816176 - DNA, 19 bp, Mus musculus
  siRNA target sequence for Tas2r107 (NM_199154.1,656-674).
gcacaaaagtacatgtgaa

SEQ ID NO: 816177 - DNA, 19 bp, Mus musculus
  siRNA target sequence for Tas2r107 (NM_199154.1,657-675).
cacaaaagtacatgtgaaa

SEQ ID NO: 816178 - DNA, 19 bp, Mus musculus
  siRNA target sequence for Tas2r107 (NM_199154.1,708-726).
ctttattctgcattttgta

SEQ ID NO: 816179 - DNA, 19 bp, Mus musculus
  siRNA target sequence for Tas2r107 (NM_199154.1,734-752).
ccatagaagtgctatgctt

SEQ ID NO: 816180 - DNA, 19 bp, Mus musculus
  siRNA target sequence for Tas2r107 (NM_199154.1,735-753).
catagaagtgctatgcttt

SEQ ID NO: 816181 - DNA, 19 bp, Mus musculus
  siRNA target sequence for Tas2r107 (NM_199154.1,812-830).
cctgcggtcactcaatcat

SEQ ID NO: 816182 - DNA, 19 bp, Mus musculus
  siRNA target sequence for Tas2r107 (NM_199154.1,817-835).
ggtcactcaatcatcgtaa

SEQ ID NO: 816183 - DNA, 19 bp, Mus musculus
  siRNA target sequence for Tas2r107 (NM_199154.1,818-836).
gtcactcaatcatcgtaat

SEQ ID NO: 816184 - DNA, 19 bp, Mus musculus
  siRNA target sequence for Tas2r107 (NM_199154.1,820-838).
cactcaatcatcgtaattt

SEQ ID NO: 816185 - DNA, 19 bp, Mus musculus
  siRNA target sequence for Tas2r107 (NM_199154.1,822-840).
ctcaatcatcgtaatttta

SEQ ID NO: 816186 - DNA, 19 bp, Mus musculus
  siRNA target sequence for Tas2r107 (NM_199154.1,828-846).
catcgtaattttaggaaat

SEQ ID NO: 816187 - DNA, 19 bp, Mus musculus
  siRNA target sequence for Tas2r107 (NM_199154.1,874-892).
gcactgcagcaactaaaat

SEQ ID NO: 816188 - DNA, 19 bp, Mus musculus
  siRNA target sequence for Tas2r110 (NM_199155.1,21-39).
caccagtgatatttttact

SEQ ID NO: 816189 - DNA, 19 bp, Mus musculus
  siRNA target sequence for Tas2r110 (NM_199155.1,58-76).
gtggaattagtaataggaa

SEQ ID NO: 816190 - DNA, 19 bp, Mus musculus
  siRNA target sequence for Tas2r110 (NM_199155.1,60-78).
ggaattagtaataggaatt

SEQ ID NO: 816191 - DNA, 19 bp, Mus musculus
  siRNA target sequence for Tas2r110 (NM_199155.1,61-79).
gaattagtaataggaattt

SEQ ID NO: 816192 - DNA, 19 bp, Mus musculus
  siRNA target sequence for Tas2r110 (NM_199155.1,170-188).
ccattaccagatttctcta

SEQ ID NO: 816193 - DNA, 19 bp, Mus musculus
  siRNA target sequence for Tas2r110 (NM_199155.1,184-202).
ctctatgtgtggtttatga

SEQ ID NO: 816194 - DNA, 19 bp, Mus musculus
  siRNA target sequence for Tas2r110 (NM_199155.1,240-258).
gcttacaagatcagaaata

SEQ ID NO: 816195 - DNA, 19 bp, Mus musculus
  siRNA target sequence for Tas2r110 (NM_199155.1,259-277).
gtaacatcaattggtatta

SEQ ID NO: 816196 - DNA, 19 bp, Mus musculus
  siRNA target sequence for Tas2r110 (NM_199155.1,266-284).
caattggtattatttggat

SEQ ID NO: 816197 - DNA, 19 bp, Mus musculus
  siRNA target sequence for Tas2r110 (NM_199155.1,281-299).
ggatagtgaataaccattt

SEQ ID NO: 816198 - DNA, 19 bp, Mus musculus
  siRNA target sequence for Tas2r110 (NM_199155.1,315-333).
cacatgcctcggtgtcttt

SEQ ID NO: 816199 - DNA, 19 bp, Mus musculus
  siRNA target sequence for Tas2r110 (NM_199155.1,317-335).
catgcctcggtgtctttta

SEQ ID NO: 816200 - DNA, 19 bp, Mus musculus
  siRNA target sequence for Tas2r110 (NM_199155.1,421-439).
gtatcaatgattttcttga

SEQ ID NO: 816201 - DNA, 19 bp, Mus musculus
  siRNA target sequence for Tas2r110 (NM_199155.1,455-473).
ctctaagcatgtatgatca

SEQ ID NO: 816202 - DNA, 19 bp, Mus musculus
  siRNA target sequence for Tas2r110 (NM_199155.1,474-492).
gttctcaattgatgtttat

SEQ ID NO: 816203 - DNA, 19 bp, Mus musculus
  siRNA target sequence for Tas2r110 (NM_199155.1,477-495).
ctcaattgatgtttatgaa

SEQ ID NO: 816204 - DNA, 19 bp, Mus musculus
  siRNA target sequence for Tas2r110 (NM_199155.1,546-564).
cttattcatcaattcatca

SEQ ID NO: 816205 - DNA, 19 bp, Mus musculus
  siRNA target sequence for Tas2r110 (NM_199155.1,560-578).
catcaaaagttttcgtaat

SEQ ID NO: 816206 - DNA, 19 bp, Mus musculus
  siRNA target sequence for Tas2r110 (NM_199155.1,585-603).
ctcatcccatattttctta

SEQ ID NO: 816207 - DNA, 19 bp, Mus musculus
  siRNA target sequence for Tas2r110 (NM_199155.1,815-833).
gaatgttgagccttaggtt

SEQ ID NO: 816208 - DNA, 19 bp, Mus musculus
  siRNA target sequence for Tas2r110 (NM_199155.1,838-856).
ggaggaaaattaatacttt

SEQ ID NO: 816209 - DNA, 19 bp, Mus musculus
  siRNA target sequence for Tas2r110 (NM_199155.1,865-883).
cacatttctggaataggtt

SEQ ID NO: 816210 - DNA, 19 bp, Mus musculus
  siRNA target sequence for Tas2r110 (NM_199155.1,872-890).
ctggaataggttttcctat

SEQ ID NO: 816211 - DNA, 19 bp, Mus musculus
  siRNA target sequence for Tas2r110 (NM_199155.1,904-922).
gtgctgattctgggaaata

SEQ ID NO: 816212 - DNA, 19 bp, Mus musculus
  siRNA target sequence for Tas2r110 (NM_199155.1,932-950).
gacaagccagtctttcagt

SEQ ID NO: 816213 - DNA, 19 bp, Mus musculus
  siRNA target sequence for Tas2r110 (NM_199155.1,963-981).
gaggtgccgatccaaagat

SEQ ID NO: 816214 - DNA, 19 bp, Mus musculus
  siRNA target sequence for Tas2r110 (NM_199155.1,965-983).
ggtgccgatccaaagatat

SEQ ID NO: 816215 - DNA, 19 bp, Mus musculus
  siRNA target sequence for Tas2r130 (NM_199156.1,3-21).
gacatacgaaacagatact

SEQ ID NO: 816216 - DNA, 19 bp, Mus musculus
  siRNA target sequence for Tas2r130 (NM_199156.1,9-27).
cgaaacagatactacctta

SEQ ID NO: 816217 - DNA, 19 bp, Mus musculus
  siRNA target sequence for Tas2r130 (NM_199156.1,10-28).
gaaacagatactaccttaa

SEQ ID NO: 816218 - DNA, 19 bp, Mus musculus
  siRNA target sequence for Tas2r130 (NM_199156.1,48-66).
ggccttagtagggatttta

SEQ ID NO: 816219 - DNA, 19 bp, Mus musculus
  siRNA target sequence for Tas2r130 (NM_199156.1,117-135).
gaagattgcctctattgat

SEQ ID NO: 816220 - DNA, 19 bp, Mus musculus
  siRNA target sequence for Tas2r130 (NM_199156.1,125-143).
cctctattgatttaatcct

SEQ ID NO: 816221 - DNA, 19 bp, Mus musculus
  siRNA target sequence for Tas2r130 (NM_199156.1,151-169).
gtggccatgtccagaattt

SEQ ID NO: 816222 - DNA, 19 bp, Mus musculus
  siRNA target sequence for Tas2r130 (NM_199156.1,156-174).
catgtccagaatttgtcta

SEQ ID NO: 816223 - DNA, 19 bp, Mus musculus
  siRNA target sequence for Tas2r130 (NM_199156.1,187-205).
ctattagattgtattatat

SEQ ID NO: 816224 - DNA, 19 bp, Mus musculus
  siRNA target sequence for Tas2r130 (NM_199156.1,267-285).
gacacttaccaaccattta

SEQ ID NO: 816225 - DNA, 19 bp, Mus musculus
  siRNA target sequence for Tas2r130 (NM_199156.1,350-368).
ctcttttcctctggataaa

SEQ ID NO: 816226 - DNA, 19 bp, Mus musculus
  siRNA target sequence for Tas2r130 (NM_199156.1,352-370).
cttttcctctggataaagt

SEQ ID NO: 816227 - DNA, 19 bp, Mus musculus
  siRNA target sequence for Tas2r130 (NM_199156.1,371-389).
ggagaattgacaagctaat

SEQ ID NO: 816228 - DNA, 19 bp, Mus musculus
  siRNA target sequence for Tas2r130 (NM_199156.1,372-390).
gagaattgacaagctaatt

SEQ ID NO: 816229 - DNA, 19 bp, Mus musculus
  siRNA target sequence for Tas2r130 (NM_199156.1,374-392).
gaattgacaagctaattct

SEQ ID NO: 816230 - DNA, 19 bp, Mus musculus
  siRNA target sequence for Tas2r130 (NM_199156.1,384-402).
gctaattctcagaactcta

SEQ ID NO: 816231 - DNA, 19 bp, Mus musculus
  siRNA target sequence for Tas2r130 (NM_199156.1,400-418).
ctactggcatgtgtgatta

SEQ ID NO: 816232 - DNA, 19 bp, Mus musculus
  siRNA target sequence for Tas2r130 (NM_199156.1,463-481).
gatttcagacgttgtgtta

SEQ ID NO: 816233 - DNA, 19 bp, Mus musculus
  siRNA target sequence for Tas2r130 (NM_199156.1,468-486).
cagacgttgtgttaagaca

SEQ ID NO: 816234 - DNA, 19 bp, Mus musculus
  siRNA target sequence for Tas2r130 (NM_199156.1,470-488).
gacgttgtgttaagacaaa

SEQ ID NO: 816235 - DNA, 19 bp, Mus musculus
  siRNA target sequence for Tas2r130 (NM_199156.1,539-557).
cctctgtcaaggtaaatct

SEQ ID NO: 816236 - DNA, 19 bp, Mus musculus
  siRNA target sequence for Tas2r130 (NM_199156.1,542-560).
ctgtcaaggtaaatctcaa

SEQ ID NO: 816237 - DNA, 19 bp, Mus musculus
  siRNA target sequence for Tas2r130 (NM_199156.1,640-658).
cagatacaactcagtgtaa

SEQ ID NO: 816238 - DNA, 19 bp, Mus musculus
  siRNA target sequence for Tas2r130 (NM_199156.1,651-669).
cagtgtaacagggtacaaa

SEQ ID NO: 816239 - DNA, 19 bp, Mus musculus
  siRNA target sequence for Tas2r130 (NM_199156.1,858-876).
cctggggagtagtaaacta

SEQ ID NO: 816240 - DNA, 19 bp, Mus musculus
  siRNA target sequence for Tas2r130 (NM_199156.1,859-877).
ctggggagtagtaaactaa

SEQ ID NO: 816241 - DNA, 19 bp, Mus musculus
  siRNA target sequence for Tas2r130 (NM_199156.1,861-879).
ggggagtagtaaactaaaa

SEQ ID NO: 816242 - DNA, 19 bp, Mus musculus
  siRNA target sequence for Tas2r130 (NM_199156.1,863-881).
ggagtagtaaactaaaaca

SEQ ID NO: 816243 - DNA, 19 bp, Mus musculus
  siRNA target sequence for Tas2r135 (NM_199159.1,72-90).
gacagtcgtcaccttattt

SEQ ID NO: 816244 - DNA, 19 bp, Mus musculus
  siRNA target sequence for Tas2r135 (NM_199159.1,74-92).
cagtcgtcaccttatttat

SEQ ID NO: 816245 - DNA, 19 bp, Mus musculus
  siRNA target sequence for Tas2r135 (NM_199159.1,76-94).
gtcgtcaccttatttatca

SEQ ID NO: 816246 - DNA, 19 bp, Mus musculus
  siRNA target sequence for Tas2r135 (NM_199159.1,78-96).
cgtcaccttatttatcatt

SEQ ID NO: 816247 - DNA, 19 bp, Mus musculus
  siRNA target sequence for Tas2r135 (NM_199159.1,81-99).
caccttatttatcatttta

SEQ ID NO: 816248 - DNA, 19 bp, Mus musculus
  siRNA target sequence for Tas2r135 (NM_199159.1,83-101).
ccttatttatcattttagt

SEQ ID NO: 816249 - DNA, 19 bp, Mus musculus
  siRNA target sequence for Tas2r135 (NM_199159.1,119-137).
cagtggtaggcaatggatt

SEQ ID NO: 816250 - DNA, 19 bp, Mus musculus
  siRNA target sequence for Tas2r135 (NM_199159.1,121-139).
gtggtaggcaatggattta

SEQ ID NO: 816251 - DNA, 19 bp, Mus musculus
  siRNA target sequence for Tas2r135 (NM_199159.1,124-142).
gtaggcaatggatttatca

SEQ ID NO: 816252 - DNA, 19 bp, Mus musculus
  siRNA target sequence for Tas2r135 (NM_199159.1,127-145).
ggcaatggatttatcatta

SEQ ID NO: 816253 - DNA, 19 bp, Mus musculus
  siRNA target sequence for Tas2r135 (NM_199159.1,128-146).
gcaatggatttatcattat

SEQ ID NO: 816254 - DNA, 19 bp, Mus musculus
  siRNA target sequence for Tas2r135 (NM_199159.1,129-147).
caatggatttatcattata

SEQ ID NO: 816255 - DNA, 19 bp, Mus musculus
  siRNA target sequence for Tas2r135 (NM_199159.1,149-167).
cactgggcatgaaatggtt

SEQ ID NO: 816256 - DNA, 19 bp, Mus musculus
  siRNA target sequence for Tas2r135 (NM_199159.1,179-197).
cactgtcagctcataataa

SEQ ID NO: 816257 - DNA, 19 bp, Mus musculus
  siRNA target sequence for Tas2r135 (NM_199159.1,181-199).
ctgtcagctcataataagt

SEQ ID NO: 816258 - DNA, 19 bp, Mus musculus
  siRNA target sequence for Tas2r135 (NM_199159.1,183-201).
gtcagctcataataagtta

SEQ ID NO: 816259 - DNA, 19 bp, Mus musculus
  siRNA target sequence for Tas2r135 (NM_199159.1,187-205).
gctcataataagttactga

SEQ ID NO: 816260 - DNA, 19 bp, Mus musculus
  siRNA target sequence for Tas2r135 (NM_199159.1,188-206).
ctcataataagttactgat

SEQ ID NO: 816261 - DNA, 19 bp, Mus musculus
  siRNA target sequence for Tas2r135 (NM_199159.1,241-259).
gtggtgataggtaagaata

SEQ ID NO: 816262 - DNA, 19 bp, Mus musculus
  siRNA target sequence for Tas2r135 (NM_199159.1,243-261).
ggtgataggtaagaatatt

SEQ ID NO: 816263 - DNA, 19 bp, Mus musculus
  siRNA target sequence for Tas2r135 (NM_199159.1,244-262).
gtgataggtaagaatattt

SEQ ID NO: 816264 - DNA, 19 bp, Mus musculus
  siRNA target sequence for Tas2r135 (NM_199159.1,412-430).
gtctttgtctggctaaagt

SEQ ID NO: 816265 - DNA, 19 bp, Mus musculus
  siRNA target sequence for Tas2r135 (NM_199159.1,472-490).
gtggggatgtcgagcttaa

SEQ ID NO: 816266 - DNA, 19 bp, Mus musculus
  siRNA target sequence for Tas2r135 (NM_199159.1,474-492).
ggggatgtcgagcttaact

SEQ ID NO: 816267 - DNA, 19 bp, Mus musculus
  siRNA target sequence for Tas2r135 (NM_199159.1,475-493).
gggatgtcgagcttaacta

SEQ ID NO: 816268 - DNA, 19 bp, Mus musculus
  siRNA target sequence for Tas2r135 (NM_199159.1,477-495).
gatgtcgagcttaactagt

SEQ ID NO: 816269 - DNA, 19 bp, Mus musculus
  siRNA target sequence for Tas2r135 (NM_199159.1,483-501).
gagcttaactagtatccta

SEQ ID NO: 816270 - DNA, 19 bp, Mus musculus
  siRNA target sequence for Tas2r135 (NM_199159.1,491-509).
ctagtatcctatgtttcat

SEQ ID NO: 816271 - DNA, 19 bp, Mus musculus
  siRNA target sequence for Tas2r135 (NM_199159.1,503-521).
gtttcataggcaattatat

SEQ ID NO: 816272 - DNA, 19 bp, Mus musculus
  siRNA target sequence for Tas2r135 (NM_199159.1,507-525).
cataggcaattatatgata

SEQ ID NO: 816273 - DNA, 19 bp, Mus musculus
  siRNA target sequence for Tas2r135 (NM_199159.1,565-583).
gtcactgggaatagcttaa

SEQ ID NO: 816274 - DNA, 19 bp, Mus musculus
  siRNA target sequence for Tas2r135 (NM_199159.1,569-587).
ctgggaatagcttaagaca

SEQ ID NO: 816275 - DNA, 19 bp, Mus musculus
  siRNA target sequence for Tas2r135 (NM_199159.1,586-604).
cactcacttgagaaattct

SEQ ID NO: 816276 - DNA, 19 bp, Mus musculus
  siRNA target sequence for Tas2r135 (NM_199159.1,668-686).
gtttgctcctcgtatcttt

SEQ ID NO: 816277 - DNA, 19 bp, Mus musculus
  siRNA target sequence for Tas2r135 (NM_199159.1,711-729).
cttggccctttcagaactt

SEQ ID NO: 816278 - DNA, 19 bp, Mus musculus
  siRNA target sequence for Tas2r135 (NM_199159.1,740-758).
gggcacaggcccatttcaa

SEQ ID NO: 816279 - DNA, 19 bp, Mus musculus
  siRNA target sequence for Tas2r135 (NM_199159.1,895-913).
gtgatacatcccattgtta

SEQ ID NO: 816280 - DNA, 19 bp, Mus musculus
  siRNA target sequence for Tas2r135 (NM_199159.1,897-915).
gatacatcccattgttata

SEQ ID NO: 816281 - DNA, 19 bp, Mus musculus
  siRNA target sequence for Bckdhb (NM_199195.1,155-173).
cctcttccagtcaataaca

SEQ ID NO: 816282 - DNA, 19 bp, Mus musculus
  siRNA target sequence for Bckdhb (NM_199195.1,156-174).
ctcttccagtcaataacaa

SEQ ID NO: 816283 - DNA, 19 bp, Mus musculus
  siRNA target sequence for Bckdhb (NM_199195.1,201-219).
gaccccactgcagtaatat

SEQ ID NO: 816284 - DNA, 19 bp, Mus musculus
  siRNA target sequence for Bckdhb (NM_199195.1,203-221).
ccccactgcagtaatattt

SEQ ID NO: 816285 - DNA, 19 bp, Mus musculus
  siRNA target sequence for Bckdhb (NM_199195.1,206-224).
cactgcagtaatatttggt

SEQ ID NO: 816286 - DNA, 19 bp, Mus musculus
  siRNA target sequence for Bckdhb (NM_199195.1,251-269).
ccgatgcactgttggttta

SEQ ID NO: 816287 - DNA, 19 bp, Mus musculus
  siRNA target sequence for Bckdhb (NM_199195.1,261-279).
gttggtttacgagacaaat

SEQ ID NO: 816288 - DNA, 19 bp, Mus musculus
  siRNA target sequence for Bckdhb (NM_199195.1,271-289).
gagacaaatacggaaaaga

SEQ ID NO: 816289 - DNA, 19 bp, Mus musculus
  siRNA target sequence for Bckdhb (NM_199195.1,281-299).
cggaaaagatagagtgttt

SEQ ID NO: 816290 - DNA, 19 bp, Mus musculus
  siRNA target sequence for Bckdhb (NM_199195.1,311-329).
gtgtgaacaaggaatagtt

SEQ ID NO: 816291 - DNA, 19 bp, Mus musculus
  siRNA target sequence for Bckdhb (NM_199195.1,353-371).
caccggtgctacagctatt

SEQ ID NO: 816292 - DNA, 19 bp, Mus musculus
  siRNA target sequence for Bckdhb (NM_199195.1,364-382).
cagctattgcggaaatcca

SEQ ID NO: 816293 - DNA, 19 bp, Mus musculus
  siRNA target sequence for Bckdhb (NM_199195.1,381-399).
cagtttgccgactatattt

SEQ ID NO: 816294 - DNA, 19 bp, Mus musculus
  siRNA target sequence for Bckdhb (NM_199195.1,422-440).
caacgaagctgccaagtat

SEQ ID NO: 816295 - DNA, 19 bp, Mus musculus
  siRNA target sequence for Bckdhb (NM_199195.1,443-461).
ctaccgctcaggtgatctt

SEQ ID NO: 816296 - DNA, 19 bp, Mus musculus
  siRNA target sequence for Bckdhb (NM_199195.1,447-465).
cgctcaggtgatcttttca

SEQ ID NO: 816297 - DNA, 19 bp, Mus musculus
  siRNA target sequence for Bckdhb (NM_199195.1,614-632).
gttgtcatgcatagaagat

SEQ ID NO: 816298 - DNA, 19 bp, Mus musculus
  siRNA target sequence for Bckdhb (NM_199195.1,617-635).
gtcatgcatagaagataaa

SEQ ID NO: 816299 - DNA, 19 bp, Mus musculus
  siRNA target sequence for Bckdhb (NM_199195.1,801-819).
gcttccatggcccaagaaa

SEQ ID NO: 816300 - DNA, 19 bp, Mus musculus
  siRNA target sequence for Bckdhb (NM_199195.1,805-823).
ccatggcccaagaaaagct

SEQ ID NO: 816301 - DNA, 19 bp, Mus musculus
  siRNA target sequence for Bckdhb (NM_199195.1,821-839).
gcttggagtatcttgtgaa

SEQ ID NO: 816302 - DNA, 19 bp, Mus musculus
  siRNA target sequence for Bckdhb (NM_199195.1,826-844).
gagtatcttgtgaagtcat

SEQ ID NO: 816303 - DNA, 19 bp, Mus musculus
  siRNA target sequence for Bckdhb (NM_199195.1,842-860).
catcgatctgcggacaatt

SEQ ID NO: 816304 - DNA, 19 bp, Mus musculus
  siRNA target sequence for Bckdhb (NM_199195.1,865-883).
cttgggatgtggatacagt

SEQ ID NO: 816305 - DNA, 19 bp, Mus musculus
  siRNA target sequence for Bckdhb (NM_199195.1,923-941).
ccacgaggctcccttaaca

SEQ ID NO: 816306 - DNA, 19 bp, Mus musculus
  siRNA target sequence for Bckdhb (NM_199195.1,970-988).
cggtccaggaagaatgttt

SEQ ID NO: 816307 - DNA, 19 bp, Mus musculus
  siRNA target sequence for Bckdhb (NM_199195.1,995-1013).
cctagaggctccaatatct

SEQ ID NO: 816308 - DNA, 19 bp, Mus musculus
  siRNA target sequence for Bckdhb (NM_199195.1,1012-1030).
ctcgagtttgcggatatga

SEQ ID NO: 816309 - DNA, 19 bp, Mus musculus
  siRNA target sequence for Bckdhb (NM_199195.1,1014-1032).
cgagtttgcggatatgaca

SEQ ID NO: 816310 - DNA, 19 bp, Mus musculus
  siRNA target sequence for Bckdhb (NM_199195.1,1034-1052).
cccgtttcctcacatcttt

SEQ ID NO: 816311 - DNA, 19 bp, Mus musculus
  siRNA target sequence for Bckdhb (NM_199195.1,1058-1076).
cttttatatcccagacaaa

SEQ ID NO: 816312 - DNA, 19 bp, Mus musculus
  siRNA target sequence for 1110032A13Rik (NM_199197.1,231-249).
ccaggaagaagttttggta

SEQ ID NO: 816313 - DNA, 19 bp, Mus musculus
  siRNA target sequence for 1110032A13Rik (NM_199197.1,232-250).
caggaagaagttttggtat

SEQ ID NO: 816314 - DNA, 19 bp, Mus musculus
  siRNA target sequence for 1110032A13Rik (NM_199197.1,235-253).
gaagaagttttggtatgaa

SEQ ID NO: 816315 - DNA, 19 bp, Mus musculus
  siRNA target sequence for 1110032A13Rik (NM_199197.1,285-303).
ggccatccaagcatgagtt

SEQ ID NO: 816316 - DNA, 19 bp, Mus musculus
  siRNA target sequence for 1110032A13Rik (NM_199197.1,309-327).
cgaagaccacctcaaagaa

SEQ ID NO: 816317 - DNA, 19 bp, Mus musculus
  siRNA target sequence for 1110032A13Rik (NM_199197.1,371-389).
cttctctacaaatcattga

SEQ ID NO: 816318 - DNA, 19 bp, Mus musculus
  siRNA target sequence for 1110032A13Rik (NM_199197.1,567-585).
ggcatcttctgatatctca

SEQ ID NO: 816319 - DNA, 19 bp, Mus musculus
  siRNA target sequence for 1110032A13Rik (NM_199197.1,606-624).
cacccatagtgtttgttca

SEQ ID NO: 816320 - DNA, 19 bp, Mus musculus
  siRNA target sequence for 1110032A13Rik (NM_199197.1,759-777).
cagccgcacacccaaatct

SEQ ID NO: 816321 - DNA, 19 bp, Mus musculus
  siRNA target sequence for 1110032A13Rik (NM_199197.1,761-779).
gccgcacacccaaatctgt

SEQ ID NO: 816322 - DNA, 19 bp, Mus musculus
  siRNA target sequence for 1110032A13Rik (NM_199197.1,788-806).
gaccacgaggcgctgaata

SEQ ID NO: 816323 - DNA, 19 bp, Mus musculus
  siRNA target sequence for 1110032A13Rik (NM_199197.1,793-811).
cgaggcgctgaataagcaa

SEQ ID NO: 816324 - DNA, 19 bp, Mus musculus
  siRNA target sequence for 1110032A13Rik (NM_199197.1,798-816).
cgctgaataagcaaataat

SEQ ID NO: 816325 - DNA, 19 bp, Mus musculus
  siRNA target sequence for 1110032A13Rik (NM_199197.1,808-826).
gcaaataatggagtacaaa

SEQ ID NO: 816326 - DNA, 19 bp, Mus musculus
  siRNA target sequence for Hdac10 (NM_199198.1,365-383).
ggtgcacagcccggaatat

SEQ ID NO: 816327 - DNA, 19 bp, Mus musculus
  siRNA target sequence for Hdac10 (NM_199198.1,705-723).
ggccagggcatccagtata

SEQ ID NO: 816328 - DNA, 19 bp, Mus musculus
  siRNA target sequence for Hdac10 (NM_199198.1,706-724).
gccagggcatccagtatat

SEQ ID NO: 816329 - DNA, 19 bp, Mus musculus
  siRNA target sequence for Hdac10 (NM_199198.1,708-726).
cagggcatccagtatatct

SEQ ID NO: 816330 - DNA, 19 bp, Mus musculus
  siRNA target sequence for Hdac10 (NM_199198.1,712-730).
gcatccagtatatcttcaa

SEQ ID NO: 816331 - DNA, 19 bp, Mus musculus
  siRNA target sequence for Hdac10 (NM_199198.1,830-848).
gcagggccaaggtttcact

SEQ ID NO: 816332 - DNA, 19 bp, Mus musculus
  siRNA target sequence for Hdac10 (NM_199198.1,953-971).
gctggtgtcggctggattt

SEQ ID NO: 816333 - DNA, 19 bp, Mus musculus
  siRNA target sequence for Hdac10 (NM_199198.1,1055-1073).
ggctggtggccggatttgt

SEQ ID NO: 816334 - DNA, 19 bp, Mus musculus
  siRNA target sequence for Hdac10 (NM_199198.1,1240-1258).
ggacaagcctccagcaaaa

SEQ ID NO: 816335 - DNA, 19 bp, Mus musculus
  siRNA target sequence for Hdac10 (NM_199198.1,1241-1259).
gacaagcctccagcaaaat

SEQ ID NO: 816336 - DNA, 19 bp, Mus musculus
  siRNA target sequence for Hdac10 (NM_199198.1,1453-1471).
ctggagtgctccatcaaga

SEQ ID NO: 816337 - DNA, 19 bp, Mus musculus
  siRNA target sequence for Hdac10 (NM_199198.1,1546-1564).
ccacactggggaagattct

SEQ ID NO: 816338 - DNA, 19 bp, Mus musculus
  siRNA target sequence for Hdac10 (NM_199198.1,1559-1577).
gattctgtgtctcttagat

SEQ ID NO: 816339 - DNA, 19 bp, Mus musculus
  siRNA target sequence for Hdac10 (NM_199198.1,1567-1585).
gtctcttagatggaatcat

SEQ ID NO: 816340 - DNA, 19 bp, Mus musculus
  siRNA target sequence for Hdac10 (NM_199198.1,1636-1654).
cagcaacattggatgtact

SEQ ID NO: 816341 - DNA, 19 bp, Mus musculus
  siRNA target sequence for Hdac10 (NM_199198.1,1639-1657).
caacattggatgtactcat

SEQ ID NO: 816342 - DNA, 19 bp, Mus musculus
  siRNA target sequence for Hdac10 (NM_199198.1,1863-1881).
ctgcccttggcctatggtt

SEQ ID NO: 816343 - DNA, 19 bp, Mus musculus
  siRNA target sequence for Hdac10 (NM_199198.1,2033-2051).
cctggcgcaggcattgcat

SEQ ID NO: 816344 - DNA, 19 bp, Mus musculus
  siRNA target sequence for AI316787 (NM_199199.1,370-388).
gagtgctggctgcattgat

SEQ ID NO: 816345 - DNA, 19 bp, Mus musculus
  siRNA target sequence for AI316787 (NM_199199.1,414-432).
gaactgtacgtcatggtaa

SEQ ID NO: 816346 - DNA, 19 bp, Mus musculus
  siRNA target sequence for BC025575 (NM_199200.1,757-775).
catggcctcccctacatct

SEQ ID NO: 816347 - DNA, 19 bp, Mus musculus
  siRNA target sequence for BC025575 (NM_199200.1,813-831).
gcacctaccacacaatctt

SEQ ID NO: 816348 - DNA, 19 bp, Mus musculus
  siRNA target sequence for BC025575 (NM_199200.1,858-876).
cgctgctggtgctcattct

SEQ ID NO: 816349 - DNA, 19 bp, Mus musculus
  siRNA target sequence for BC025575 (NM_199200.1,878-896).
ctgtgtctactgatctact

SEQ ID NO: 816350 - DNA, 19 bp, Mus musculus
  siRNA target sequence for BC025575 (NM_199200.1,910-928).
ctgcttgaagcctagacaa

SEQ ID NO: 816351 - DNA, 19 bp, Mus musculus
  siRNA target sequence for BC025575 (NM_199200.1,1107-1125).
cctcgcgggatgacttctt

SEQ ID NO: 816352 - DNA, 19 bp, Mus musculus
  siRNA target sequence for BC025575 (NM_199200.1,1311-1329).
cgccatccttcgaccatta

SEQ ID NO: 816353 - DNA, 19 bp, Mus musculus
  siRNA target sequence for BC025575 (NM_199200.1,1312-1330).
gccatccttcgaccattat

SEQ ID NO: 816354 - DNA, 19 bp, Mus musculus
  siRNA target sequence for BC025575 (NM_199200.1,1314-1332).
catccttcgaccattatct

SEQ ID NO: 816355 - DNA, 19 bp, Mus musculus
  siRNA target sequence for BC025575 (NM_199200.1,1498-1516).
ggtgatccccgcacactat

SEQ ID NO: 816356 - DNA, 19 bp, Mus musculus
  siRNA target sequence for BC025575 (NM_199200.1,1722-1740).
ccattccggtgctgttcaa

SEQ ID NO: 816357 - DNA, 19 bp, Mus musculus
  siRNA target sequence for BC025575 (NM_199200.1,1843-1861).
cctggacggacgttccaat

SEQ ID NO: 816358 - DNA, 19 bp, Mus musculus
  siRNA target sequence for BC025575 (NM_199200.1,1844-1862).
ctggacggacgttccaatt

SEQ ID NO: 816359 - DNA, 19 bp, Mus musculus
  siRNA target sequence for BC025575 (NM_199200.1,1846-1864).
ggacggacgttccaattca

SEQ ID NO: 816360 - DNA, 19 bp, Mus musculus
  siRNA target sequence for BC025575 (NM_199200.1,1849-1867).
cggacgttccaattcacaa

SEQ ID NO: 816361 - DNA, 19 bp, Mus musculus
  siRNA target sequence for clm-3 (NM_199201.1,156-174).
ctggtgccgaggagcttat

SEQ ID NO: 816362 - DNA, 19 bp, Mus musculus
  siRNA target sequence for clm-3 (NM_199201.1,163-181).
cgaggagcttattggaaat

SEQ ID NO: 816363 - DNA, 19 bp, Mus musculus
  siRNA target sequence for clm-3 (NM_199201.1,166-184).
ggagcttattggaaatcat

SEQ ID NO: 816364 - DNA, 19 bp, Mus musculus
  siRNA target sequence for clm-3 (NM_199201.1,378-396).
cccagaaatttcaactaca

SEQ ID NO: 816365 - DNA, 19 bp, Mus musculus
  siRNA target sequence for clm-3 (NM_199201.1,651-669).
ctatgggggaggtgaaatt

SEQ ID NO: 816366 - DNA, 19 bp, Mus musculus
  siRNA target sequence for clm-3 (NM_199201.1,673-691).
ctggtggaaacccatagat

SEQ ID NO: 816367 - DNA, 19 bp, Mus musculus
  siRNA target sequence for clm-3 (NM_199201.1,678-696).
ggaaacccatagatctgat

SEQ ID NO: 816368 - DNA, 19 bp, Mus musculus
  siRNA target sequence for LOC217304 (NM_199221.1,21-39).
gcttcttctcagttttcca

SEQ ID NO: 816369 - DNA, 19 bp, Mus musculus
  siRNA target sequence for LOC217304 (NM_199221.1,100-118).
gtgcaatgtcgctatagct

SEQ ID NO: 816370 - DNA, 19 bp, Mus musculus
  siRNA target sequence for LOC217304 (NM_199221.1,116-134).
gctcaagatggcaaaccaa

SEQ ID NO: 816371 - DNA, 19 bp, Mus musculus
  siRNA target sequence for LOC217304 (NM_199221.1,192-210).
cactgggtcagagaaagaa

SEQ ID NO: 816372 - DNA, 19 bp, Mus musculus
  siRNA target sequence for LOC217304 (NM_199221.1,334-352).
gaccgtgggaccagagtta

SEQ ID NO: 816373 - DNA, 19 bp, Mus musculus
  siRNA target sequence for LOC217304 (NM_199221.1,336-354).
ccgtgggaccagagttaaa

SEQ ID NO: 816374 - DNA, 19 bp, Mus musculus
  siRNA target sequence for LOC217304 (NM_199221.1,338-356).
gtgggaccagagttaaagt

SEQ ID NO: 816375 - DNA, 19 bp, Mus musculus
  siRNA target sequence for LOC217304 (NM_199221.1,368-386).
cggtgggtaaagataccat

SEQ ID NO: 816376 - DNA, 19 bp, Mus musculus
  siRNA target sequence for LOC217304 (NM_199221.1,379-397).
gataccatgtcgacttcta

SEQ ID NO: 816377 - DNA, 19 bp, Mus musculus
  siRNA target sequence for LOC217304 (NM_199221.1,384-402).
catgtcgacttctaatcaa

SEQ ID NO: 816378 - DNA, 19 bp, Mus musculus
  siRNA target sequence for LOC217304 (NM_199221.1,387-405).
gtcgacttctaatcaactt

SEQ ID NO: 816379 - DNA, 19 bp, Mus musculus
  siRNA target sequence for LOC217304 (NM_199221.1,578-596).
ctctctgtagcgatttgga

SEQ ID NO: 816380 - DNA, 19 bp, Mus musculus
  siRNA target sequence for LOC217304 (NM_199221.1,588-606).
cgatttggactctgaactt

SEQ ID NO: 816381 - DNA, 19 bp, Mus musculus
  siRNA target sequence for BC020188 (NM_199222.1,203-221).
cctcgacgcaggtttgagt

SEQ ID NO: 816382 - DNA, 19 bp, Mus musculus
  siRNA target sequence for BC020188 (NM_199222.1,204-222).
ctcgacgcaggtttgagta

SEQ ID NO: 816383 - DNA, 19 bp, Mus musculus
  siRNA target sequence for BC020188 (NM_199222.1,207-225).
gacgcaggtttgagtacaa

SEQ ID NO: 816384 - DNA, 19 bp, Mus musculus
  siRNA target sequence for BC020188 (NM_199222.1,516-534).
gcatcgggatctactttga

SEQ ID NO: 816385 - DNA, 19 bp, Mus musculus
  siRNA target sequence for BC020188 (NM_199222.1,607-625).
gcagtctggggatggaaat

SEQ ID NO: 816386 - DNA, 19 bp, Mus musculus
  siRNA target sequence for BC020188 (NM_199222.1,709-727).
gctgcgtgtgtctttgagt

SEQ ID NO: 816387 - DNA, 19 bp, Mus musculus
  siRNA target sequence for BC020188 (NM_199222.1,1204-1222).
caggagcacacgtcttcta

SEQ ID NO: 816388 - DNA, 19 bp, Mus musculus
  siRNA target sequence for Rtn4rl2 (NM_199223.1,432-450).
cagcctgcctggcaacatt

SEQ ID NO: 816389 - DNA, 19 bp, Mus musculus
  siRNA target sequence for Rtn4rl2 (NM_199223.1,458-476).
gcttggtcagcctacagta

SEQ ID NO: 816390 - DNA, 19 bp, Mus musculus
  siRNA target sequence for Rtn4rl2 (NM_199223.1,906-924).
gcgcgactccgatttccaa

SEQ ID NO: 816391 - DNA, 19 bp, Mus musculus
  siRNA target sequence for LOC387565 (NM_199225.1,132-150).
gtatgagaagaaattgaaa

SEQ ID NO: 816392 - DNA, 19 bp, Mus musculus
  siRNA target sequence for LOC387565 (NM_199225.1,167-185).
ggtgcaaatggaaatctaa

SEQ ID NO: 816393 - DNA, 19 bp, Mus musculus
  siRNA target sequence for LOC387565 (NM_199225.1,171-189).
caaatggaaatctaatgta

SEQ ID NO: 816394 - DNA, 19 bp, Mus musculus
  siRNA target sequence for LOC387565 (NM_199225.1,327-345).
gtgtatggtggatatagga

SEQ ID NO: 816395 - DNA, 19 bp, Mus musculus
  siRNA target sequence for LOC387565 (NM_199225.1,329-347).
gtatggtggatataggatt

SEQ ID NO: 816396 - DNA, 19 bp, Mus musculus
  siRNA target sequence for LOC387565 (NM_199225.1,336-354).
ggatataggattcttttat

SEQ ID NO: 816397 - DNA, 19 bp, Mus musculus
  siRNA target sequence for LOC387565 (NM_199225.1,358-376).
gcctacttacagatcgata

SEQ ID NO: 816398 - DNA, 19 bp, Mus musculus
  siRNA target sequence for LOC387565 (NM_199225.1,434-452).
gccctgggaacggtatcaa

SEQ ID NO: 816399 - DNA, 19 bp, Mus musculus
  siRNA target sequence for LOC387565 (NM_199225.1,436-454).
cctgggaacggtatcaaca

SEQ ID NO: 816400 - DNA, 19 bp, Mus musculus
  siRNA target sequence for LOC387565 (NM_199225.1,437-455).
ctgggaacggtatcaacat

SEQ ID NO: 816401 - DNA, 19 bp, Mus musculus
  siRNA target sequence for LOC387565 (NM_199225.1,440-458).
ggaacggtatcaacattct

SEQ ID NO: 816402 - DNA, 19 bp, Mus musculus
  siRNA target sequence for Sema6d (NM_199239.1,1763-1781).
caactacaccagattacaa

SEQ ID NO: 816403 - DNA, 19 bp, Mus musculus
  siRNA target sequence for Sema6d (NM_199239.1,1766-1784).
ctacaccagattacaaaat

SEQ ID NO: 816404 - DNA, 19 bp, Mus musculus
  siRNA target sequence for Sema6d (NM_199240.1,1743-1761).
ggcaagtagcccagaaatt

SEQ ID NO: 816405 - DNA, 19 bp, Mus musculus
  siRNA target sequence for Sema6d (NM_199240.1,1754-1772).
cagaaattacatctaaagt

SEQ ID NO: 816406 - DNA, 19 bp, Mus musculus
  siRNA target sequence for Sema6d (NM_199240.1,1756-1774).
gaaattacatctaaagtga

SEQ ID NO: 816407 - DNA, 19 bp, Mus musculus
  siRNA target sequence for Sema6d (NM_199240.1,1797-1815).
gacgagctcccggaaattt

SEQ ID NO: 816408 - DNA, 19 bp, Mus musculus
  siRNA target sequence for Sema6d (NM_199240.1,1799-1817).
cgagctcccggaaatttgt

SEQ ID NO: 816409 - DNA, 19 bp, Mus musculus
  siRNA target sequence for Sema6d (NM_199240.1,1800-1818).
gagctcccggaaatttgta

SEQ ID NO: 816410 - DNA, 19 bp, Mus musculus
  siRNA target sequence for Sema6d (NM_199240.1,1802-1820).
gctcccggaaatttgtagt

SEQ ID NO: 816411 - DNA, 19 bp, Mus musculus
  siRNA target sequence for Sema6d (NM_199240.1,1803-1821).
ctcccggaaatttgtagtt

SEQ ID NO: 816412 - DNA, 19 bp, Mus musculus
  siRNA target sequence for Sema6d (NM_199240.1,1805-1823).
cccggaaatttgtagttca

SEQ ID NO: 816413 - DNA, 19 bp, Mus musculus
  siRNA target sequence for Sema6d (NM_199240.1,1806-1824).
ccggaaatttgtagttcaa

SEQ ID NO: 816414 - DNA, 19 bp, Mus musculus
  siRNA target sequence for Sema6d (NM_199240.1,1819-1837).
gttcaagatgacccaaata

SEQ ID NO: 816415 - DNA, 19 bp, Mus musculus
  siRNA target sequence for unc-93A (NM_199252.1,689-707).
gatgtggtgaaccagtatt

SEQ ID NO: 816416 - DNA, 19 bp, Mus musculus
  siRNA target sequence for unc-93A (NM_199252.1,743-761).
gtgtggggcaacctgattt

SEQ ID NO: 816417 - DNA, 19 bp, Mus musculus
  siRNA target sequence for unc-93A (NM_199252.1,940-958).
cctgctggtagctgtgttt

SEQ ID NO: 816418 - DNA, 19 bp, Mus musculus
  siRNA target sequence for unc-93A (NM_199252.1,1041-1059).
ccttcatgctgtttagaga

SEQ ID NO: 816419 - DNA, 19 bp, Mus musculus
  siRNA target sequence for unc-93A (NM_199252.1,1098-1116).
gtgggtttcaacaagagtt

SEQ ID NO: 816420 - DNA, 19 bp, Mus musculus
  siRNA target sequence for unc-93A (NM_199252.1,1172-1190).
gtgggctacgtgatgatct

SEQ ID NO: 816421 - DNA, 19 bp, Mus musculus
  siRNA target sequence for unc-93A (NM_199252.1,1277-1295).
gcagccattcacttctctt

SEQ ID NO: 816422 - DNA, 19 bp, Mus musculus
  siRNA target sequence for unc-93A (NM_199252.1,1395-1413).
cacagaacaatgctctttt

SEQ ID NO: 816423 - DNA, 19 bp, Mus musculus
  siRNA target sequence for unc-93A (NM_199252.1,1420-1438).
cctgtttgaggagaacaaa

SEQ ID NO: 816424 - DNA, 19 bp, Mus musculus
  siRNA target sequence for unc-93A (NM_199252.1,1569-1587).
gttacgggacagttgagta

SEQ ID NO: 816425 - DNA, 19 bp, Mus musculus
  siRNA target sequence for Phf15 (NM_199299.1,72-90).
cacatcagcatcaagatgt

SEQ ID NO: 816426 - DNA, 19 bp, Mus musculus
  siRNA target sequence for Phf15 (NM_199299.1,235-253).
gacccgtggcgacaagaat

SEQ ID NO: 816427 - DNA, 19 bp, Mus musculus
  siRNA target sequence for Phf15 (NM_199299.1,334-352).
gctaaggcctctctcttta

SEQ ID NO: 816428 - DNA, 19 bp, Mus musculus
  siRNA target sequence for Phf15 (NM_199299.1,335-353).
ctaaggcctctctctttat

SEQ ID NO: 816429 - DNA, 19 bp, Mus musculus
  siRNA target sequence for Phf15 (NM_199299.1,339-357).
ggcctctctctttatcact

SEQ ID NO: 816430 - DNA, 19 bp, Mus musculus
  siRNA target sequence for Phf15 (NM_199299.1,546-564).
gctggatgagctaacgtta

SEQ ID NO: 816431 - DNA, 19 bp, Mus musculus
  siRNA target sequence for Phf15 (NM_199299.1,560-578).
cgttagagcgtgttctaga

SEQ ID NO: 816432 - DNA, 19 bp, Mus musculus
  siRNA target sequence for Phf15 (NM_199299.1,850-868).
gccctgaagcccactagaa

SEQ ID NO: 816433 - DNA, 19 bp, Mus musculus
  siRNA target sequence for Phf15 (NM_199299.1,1089-1107).
cctggaaatgcggactata

SEQ ID NO: 816434 - DNA, 19 bp, Mus musculus
  siRNA target sequence for Phf15 (NM_199299.1,1092-1110).
ggaaatgcggactatatta

SEQ ID NO: 816435 - DNA, 19 bp, Mus musculus
  siRNA target sequence for Phf15 (NM_199299.1,1101-1119).
gactatattagctgacaat

SEQ ID NO: 816436 - DNA, 19 bp, Mus musculus
  siRNA target sequence for Phf15 (NM_199299.1,1103-1121).
ctatattagctgacaatga

SEQ ID NO: 816437 - DNA, 19 bp, Mus musculus
  siRNA target sequence for Phf15 (NM_199299.1,1453-1471).
cgacgcctgaagcttttca

SEQ ID NO: 816438 - DNA, 19 bp, Mus musculus
  siRNA target sequence for Phf15 (NM_199299.1,1528-1546).
cgggagagaacgaaacaca

SEQ ID NO: 816439 - DNA, 19 bp, Mus musculus
  siRNA target sequence for Phf15 (NM_199299.1,1538-1556).
cgaaacacaccatctgtaa

SEQ ID NO: 816440 - DNA, 19 bp, Mus musculus
  siRNA target sequence for Phf15 (NM_199299.1,1993-2011).
cggaggacgtcttctcatt

SEQ ID NO: 816441 - DNA, 19 bp, Mus musculus
  siRNA target sequence for Phf15 (NM_199299.1,1994-2012).
ggaggacgtcttctcattt

SEQ ID NO: 816442 - DNA, 19 bp, Mus musculus
  siRNA target sequence for Phf15 (NM_199299.1,2072-2090).
cactggcctccgagatact

SEQ ID NO: 816443 - DNA, 19 bp, Mus musculus
  siRNA target sequence for Phf15 (NM_199299.1,2078-2096).
cctccgagatactagacaa

SEQ ID NO: 816444 - DNA, 19 bp, Mus musculus
  siRNA target sequence for Phf15 (NM_199299.1,2105-2123).
ccatggcttccgacttaaa

SEQ ID NO: 816445 - DNA, 19 bp, Mus musculus
  siRNA target sequence for Phf15 (NM_199299.1,2106-2124).
catggcttccgacttaaat

SEQ ID NO: 816446 - DNA, 19 bp, Mus musculus
  siRNA target sequence for Phf15 (NM_199299.1,2190-2208).
gaaggtcagtcggaaatct

SEQ ID NO: 816447 - DNA, 19 bp, Mus musculus
  siRNA target sequence for Phf15 (NM_199299.1,2290-2308).
gaggctgacggctacttct

SEQ ID NO: 816448 - DNA, 19 bp, Mus musculus
  siRNA target sequence for LOC210544 (NM_199300.1,258-276).
gtcgtcggtgtgttccatt

SEQ ID NO: 816449 - DNA, 19 bp, Mus musculus
  siRNA target sequence for LOC210544 (NM_199300.1,261-279).
gtcggtgtgttccatttct

SEQ ID NO: 816450 - DNA, 19 bp, Mus musculus
  siRNA target sequence for LOC210544 (NM_199300.1,456-474).
cttcgcctgggaatgtgat

SEQ ID NO: 816451 - DNA, 19 bp, Mus musculus
  siRNA target sequence for LOC210544 (NM_199300.1,465-483).
ggaatgtgatactctgttt

SEQ ID NO: 816452 - DNA, 19 bp, Mus musculus
  siRNA target sequence for LOC210544 (NM_199300.1,466-484).
gaatgtgatactctgtttt

SEQ ID NO: 816453 - DNA, 19 bp, Mus musculus
  siRNA target sequence for LOC210544 (NM_199300.1,472-490).
gatactctgttttgcaaat

SEQ ID NO: 816454 - DNA, 19 bp, Mus musculus
  siRNA target sequence for LOC210544 (NM_199300.1,505-523).
ccacctgagggctctaaca

SEQ ID NO: 816455 - DNA, 19 bp, Mus musculus
  siRNA target sequence for LOC210544 (NM_199300.1,506-524).
cacctgagggctctaacat

SEQ ID NO: 816456 - DNA, 19 bp, Mus musculus
  siRNA target sequence for LOC210544 (NM_199300.1,514-532).
ggctctaacatcttataca

SEQ ID NO: 816457 - DNA, 19 bp, Mus musculus
  siRNA target sequence for LOC210544 (NM_199300.1,515-533).
gctctaacatcttatacaa

SEQ ID NO: 816458 - DNA, 19 bp, Mus musculus
  siRNA target sequence for LOC210544 (NM_199300.1,516-534).
ctctaacatcttatacaaa

SEQ ID NO: 816459 - DNA, 19 bp, Mus musculus
  siRNA target sequence for LOC210544 (NM_199300.1,518-536).
ctaacatcttatacaaagt

SEQ ID NO: 816460 - DNA, 19 bp, Mus musculus
  siRNA target sequence for LOC210544 (NM_199300.1,614-632).
ccacagggctcttcagaat

SEQ ID NO: 816461 - DNA, 19 bp, Mus musculus
  siRNA target sequence for LOC210544 (NM_199300.1,690-708).
ctttgatgccggttccaat

SEQ ID NO: 816462 - DNA, 19 bp, Mus musculus
  siRNA target sequence for LOC210544 (NM_199300.1,737-755).
ggattatgcggtttgtcaa

SEQ ID NO: 816463 - DNA, 19 bp, Mus musculus
  siRNA target sequence for LOC210544 (NM_199300.1,745-763).
cggtttgtcaacatacaga

SEQ ID NO: 816464 - DNA, 19 bp, Mus musculus
  siRNA target sequence for LOC210544 (NM_199300.1,756-774).
catacagacttgtaaactt

SEQ ID NO: 816465 - DNA, 19 bp, Mus musculus
  siRNA target sequence for LOC210544 (NM_199300.1,788-806).
ggactgttgaagaaggaat

SEQ ID NO: 816466 - DNA, 19 bp, Mus musculus
  siRNA target sequence for LOC210544 (NM_199300.1,802-820).
ggaattagctcgtcagtaa

SEQ ID NO: 816467 - DNA, 19 bp, Mus musculus
  siRNA target sequence for LOC210544 (NM_199300.1,803-821).
gaattagctcgtcagtaat

SEQ ID NO: 816468 - DNA, 19 bp, Mus musculus
  siRNA target sequence for LOC210544 (NM_199300.1,829-847).
cacggtcggtacatagcat

SEQ ID NO: 816469 - DNA, 19 bp, Mus musculus
  siRNA target sequence for LOC210544 (NM_199300.1,835-853).
cggtacatagcatccatta

SEQ ID NO: 816470 - DNA, 19 bp, Mus musculus
  siRNA target sequence for LOC210544 (NM_199300.1,888-906).
ggctttaacacaagaaata

SEQ ID NO: 816471 - DNA, 19 bp, Mus musculus
  siRNA target sequence for LOC210544 (NM_199300.1,917-935).
ctcctcctctagttaaggt

SEQ ID NO: 816472 - DNA, 19 bp, Mus musculus
  siRNA target sequence for LOC210544 (NM_199300.1,968-986).
ccagcaatcttaaaatgaa

SEQ ID NO: 816473 - DNA, 19 bp, Mus musculus
  siRNA target sequence for LOC210544 (NM_199300.1,1008-1026).
gcggcctgcaagatgtaaa

SEQ ID NO: 816474 - DNA, 19 bp, Mus musculus
  siRNA target sequence for LOC210544 (NM_199300.1,1119-1137).
gcgcttacaaatcttatta

SEQ ID NO: 816475 - DNA, 19 bp, Mus musculus
  siRNA target sequence for LOC210544 (NM_199300.1,1141-1159).
ggctatggggaatatccaa

SEQ ID NO: 816476 - DNA, 19 bp, Mus musculus
  siRNA target sequence for LOC210544 (NM_199300.1,1156-1174).
ccaacaaaatacagaatgt

SEQ ID NO: 816477 - DNA, 19 bp, Mus musculus
  siRNA target sequence for LOC210544 (NM_199300.1,1173-1191).
gtttatctggcgttcctta

SEQ ID NO: 816478 - DNA, 19 bp, Mus musculus
  siRNA target sequence for LOC210544 (NM_199300.1,1195-1213).
cagctgccggaaaatcata

SEQ ID NO: 816479 - DNA, 19 bp, Mus musculus
  siRNA target sequence for LOC210544 (NM_199300.1,1197-1215).
gctgccggaaaatcatact

SEQ ID NO: 816480 - DNA, 19 bp, Mus musculus
  siRNA target sequence for LOC210544 (NM_199300.1,1241-1259).
ggactcatgcggcttatct

SEQ ID NO: 816481 - DNA, 19 bp, Mus musculus
  siRNA target sequence for LOC210544 (NM_199300.1,1292-1310).
ggaaactactgagagtatt

SEQ ID NO: 816482 - DNA, 19 bp, Mus musculus
  siRNA target sequence for LOC210544 (NM_199300.1,1314-1332).
gagaaccctctctgcatta

SEQ ID NO: 816483 - DNA, 19 bp, Mus musculus
  siRNA target sequence for LOC210544 (NM_199300.1,1416-1434).
gctcatctgttttgaagtt

SEQ ID NO: 816484 - DNA, 19 bp, Mus musculus
  siRNA target sequence for LOC210544 (NM_199300.1,1432-1450).
gttgtggctactctcataa

SEQ ID NO: 816485 - DNA, 19 bp, Mus musculus
  siRNA target sequence for LOC210544 (NM_199300.1,1435-1453).
gtggctactctcataatca

SEQ ID NO: 816486 - DNA, 19 bp, Mus musculus
  siRNA target sequence for LOC210544 (NM_199300.1,1437-1455).
ggctactctcataatcaat

SEQ ID NO: 816487 - DNA, 19 bp, Mus musculus
  siRNA target sequence for LOC210544 (NM_199300.1,1438-1456).
gctactctcataatcaatt

SEQ ID NO: 816488 - DNA, 19 bp, Mus musculus
  siRNA target sequence for LOC210544 (NM_199300.1,1484-1502).
ctaatcctcctatcaacat

SEQ ID NO: 816489 - DNA, 19 bp, Mus musculus
  siRNA target sequence for LOC210544 (NM_199300.1,1489-1507).
cctcctatcaacattctta

SEQ ID NO: 816490 - DNA, 19 bp, Mus musculus
  siRNA target sequence for LOC210544 (NM_199300.1,1560-1578).
catagatcgtgatataact

SEQ ID NO: 816491 - DNA, 19 bp, Mus musculus
  siRNA target sequence for LOC210544 (NM_199300.1,1643-1661).
ggctccgcctcttcgataa

SEQ ID NO: 816492 - DNA, 19 bp, Mus musculus
  siRNA target sequence for LOC210544 (NM_199300.1,1645-1663).
ctccgcctcttcgataaca

SEQ ID NO: 816493 - DNA, 19 bp, Mus musculus
  siRNA target sequence for LOC210544 (NM_199300.1,1649-1667).
gcctcttcgataacatctt

SEQ ID NO: 816494 - DNA, 19 bp, Mus musculus
  siRNA target sequence for LOC210544 (NM_199300.1,1726-1744).
gcgcctttgctcaactgta

SEQ ID NO: 816495 - DNA, 19 bp, Mus musculus
  siRNA target sequence for LOC210544 (NM_199300.1,1742-1760).
gtactcttaagaatgactt

SEQ ID NO: 816496 - DNA, 19 bp, Mus musculus
  siRNA target sequence for LOC210544 (NM_199300.1,1780-1798).
cggaataacctggacataa

SEQ ID NO: 816497 - DNA, 19 bp, Mus musculus
  siRNA target sequence for LOC210544 (NM_199300.1,1781-1799).
ggaataacctggacataaa

SEQ ID NO: 816498 - DNA, 19 bp, Mus musculus
  siRNA target sequence for LOC210544 (NM_199300.1,1843-1861).
gctgatatccacccaaata

SEQ ID NO: 816499 - DNA, 19 bp, Mus musculus
  siRNA target sequence for LOC210544 (NM_199300.1,1846-1864).
gatatccacccaaatagca

SEQ ID NO: 816500 - DNA, 19 bp, Mus musculus
  siRNA target sequence for LOC210544 (NM_199300.1,1894-1912).
gggcagtaccctatattta

SEQ ID NO: 816501 - DNA, 19 bp, Mus musculus
  siRNA target sequence for LOC210544 (NM_199300.1,1896-1914).
gcagtaccctatatttaat

SEQ ID NO: 816502 - DNA, 19 bp, Mus musculus
  siRNA target sequence for LOC210544 (NM_199300.1,1899-1917).
gtaccctatatttaatcaa

SEQ ID NO: 816503 - DNA, 19 bp, Mus musculus
  siRNA target sequence for LOC210544 (NM_199300.1,1961-1979).
ggataaggaacgatgaact

SEQ ID NO: 816504 - DNA, 19 bp, Mus musculus
  siRNA target sequence for LOC210544 (NM_199300.1,1993-2011).
gagaggcagacagttgaaa

SEQ ID NO: 816505 - DNA, 19 bp, Mus musculus
  siRNA target sequence for LOC210544 (NM_199300.1,1995-2013).
gaggcagacagttgaaaat

SEQ ID NO: 816506 - DNA, 19 bp, Mus musculus
  siRNA target sequence for MGC28365 (NM_199301.1,145-163).
gaagtcggtggattgtgtt

SEQ ID NO: 816507 - DNA, 19 bp, Mus musculus
  siRNA target sequence for MGC28365 (NM_199301.1,150-168).
cggtggattgtgttatcga

SEQ ID NO: 816508 - DNA, 19 bp, Mus musculus
  siRNA target sequence for MGC28365 (NM_199301.1,159-177).
gtgttatcgaggttcatga

SEQ ID NO: 816509 - DNA, 19 bp, Mus musculus
  siRNA target sequence for MGC28365 (NM_199301.1,178-196).
cgccaggatcccattttca

SEQ ID NO: 816510 - DNA, 19 bp, Mus musculus
  siRNA target sequence for MGC28365 (NM_199301.1,337-355).
cacgaactgtgtgaaagat

SEQ ID NO: 816511 - DNA, 19 bp, Mus musculus
  siRNA target sequence for MGC28365 (NM_199301.1,420-438).
gagccgagaccccagaata

SEQ ID NO: 816512 - DNA, 19 bp, Mus musculus
  siRNA target sequence for MGC28365 (NM_199301.1,422-440).
gccgagaccccagaatact

SEQ ID NO: 816513 - DNA, 19 bp, Mus musculus
  siRNA target sequence for MGC28365 (NM_199301.1,451-469).
ggtcggtgtccccaatgta

SEQ ID NO: 816514 - DNA, 19 bp, Mus musculus
  siRNA target sequence for MGC28365 (NM_199301.1,461-479).
cccaatgtaggcaaatcct

SEQ ID NO: 816515 - DNA, 19 bp, Mus musculus
  siRNA target sequence for MGC28365 (NM_199301.1,570-588).
ccagaatccaggtatgtga

SEQ ID NO: 816516 - DNA, 19 bp, Mus musculus
  siRNA target sequence for MGC28365 (NM_199301.1,716-734).
gccgattatctcctttaca

SEQ ID NO: 816517 - DNA, 19 bp, Mus musculus
  siRNA target sequence for MGC28365 (NM_199301.1,786-804).
gcgcctgtgaccaaataga

SEQ ID NO: 816518 - DNA, 19 bp, Mus musculus
  siRNA target sequence for MGC28365 (NM_199301.1,788-806).
gcctgtgaccaaatagagt

SEQ ID NO: 816519 - DNA, 19 bp, Mus musculus
  siRNA target sequence for MGC28365 (NM_199301.1,867-885).
gcacaggtaatgtcaatgt

SEQ ID NO: 816520 - DNA, 19 bp, Mus musculus
  siRNA target sequence for MGC28365 (NM_199301.1,958-976).
gatgctggaccgtgacatt

SEQ ID NO: 816521 - DNA, 19 bp, Mus musculus
  siRNA target sequence for MGC28365 (NM_199301.1,961-979).
gctggaccgtgacattata

SEQ ID NO: 816522 - DNA, 19 bp, Mus musculus
  siRNA target sequence for MGC56830 (NM_199302.1,296-314).
gatgtgtctggcaaaagaa

SEQ ID NO: 816523 - DNA, 19 bp, Mus musculus
  siRNA target sequence for MGC56830 (NM_199302.1,316-334).
ctggggcagatgacattct

SEQ ID NO: 816524 - DNA, 19 bp, Mus musculus
  siRNA target sequence for MGC56830 (NM_199302.1,351-369).
gagctctctgagattccat

SEQ ID NO: 816525 - DNA, 19 bp, Mus musculus
  siRNA target sequence for MGC56830 (NM_199302.1,385-403).
cgtgcaaagttctacagaa

SEQ ID NO: 816526 - DNA, 19 bp, Mus musculus
  siRNA target sequence for MGC56830 (NM_199302.1,408-426).
gtgttgattgtccatacaa

SEQ ID NO: 816527 - DNA, 19 bp, Mus musculus
  siRNA target sequence for MGC56830 (NM_199302.1,617-635).
gctccagacgctcaatgta

SEQ ID NO: 816528 - DNA, 19 bp, Mus musculus
  siRNA target sequence for MGC56830 (NM_199302.1,618-636).
ctccagacgctcaatgtaa

SEQ ID NO: 816529 - DNA, 19 bp, Mus musculus
  siRNA target sequence for MGC56830 (NM_199302.1,620-638).
ccagacgctcaatgtaaaa

SEQ ID NO: 816530 - DNA, 19 bp, Mus musculus
  siRNA target sequence for MGC56830 (NM_199302.1,625-643).
cgctcaatgtaaaagacaa

SEQ ID NO: 816531 - DNA, 19 bp, Mus musculus
  siRNA target sequence for MGC56830 (NM_199302.1,687-705).
ctgcggacactcgacatta

SEQ ID NO: 816532 - DNA, 19 bp, Mus musculus
  siRNA target sequence for MGC56830 (NM_199302.1,689-707).
gcggacactcgacattagt

SEQ ID NO: 816533 - DNA, 19 bp, Mus musculus
  siRNA target sequence for MGC56830 (NM_199302.1,691-709).
ggacactcgacattagtga

SEQ ID NO: 816534 - DNA, 19 bp, Mus musculus
  siRNA target sequence for MGC56830 (NM_199302.1,1486-1504).
gttccagcatggctgaaat

SEQ ID NO: 816535 - DNA, 19 bp, Mus musculus
  siRNA target sequence for MGC56830 (NM_199302.1,1489-1507).
ccagcatggctgaaatgga

SEQ ID NO: 816536 - DNA, 19 bp, Mus musculus
  siRNA target sequence for MGC56830 (NM_199302.1,1649-1667).
gaaccagattaggctaata

SEQ ID NO: 816537 - DNA, 19 bp, Mus musculus
  siRNA target sequence for MGC56830 (NM_199302.1,1853-1871).
cgaaacgaagcaggaaaat

SEQ ID NO: 816538 - DNA, 19 bp, Mus musculus
  siRNA target sequence for MGC56830 (NM_199302.1,1884-1902).
cagtaccaacggcttttaa

SEQ ID NO: 816539 - DNA, 19 bp, Mus musculus
  siRNA target sequence for MGC56830 (NM_199302.1,2080-2098).
caggcctgcaacatgagat

SEQ ID NO: 816540 - DNA, 19 bp, Mus musculus
  siRNA target sequence for LOC228796 (NM_199303.1,220-238).
ggttgggcatggacattat

SEQ ID NO: 816541 - DNA, 19 bp, Mus musculus
  siRNA target sequence for LOC228796 (NM_199303.1,365-383).
cctggagcctgttatcaca

SEQ ID NO: 816542 - DNA, 19 bp, Mus musculus
  siRNA target sequence for LOC228796 (NM_199303.1,372-390).
cctgttatcacattgaact

SEQ ID NO: 816543 - DNA, 19 bp, Mus musculus
  siRNA target sequence for LOC228796 (NM_199303.1,570-588).
ctggtcagcgtgaaaacca

SEQ ID NO: 816544 - DNA, 19 bp, Mus musculus
  siRNA target sequence for LOC228796 (NM_199303.1,587-605).
caacctgcctaacaacaaa

SEQ ID NO: 816545 - DNA, 19 bp, Mus musculus
  siRNA target sequence for LOC228796 (NM_199303.1,737-755).
gatgggcactgtcaaatat

SEQ ID NO: 816546 - DNA, 19 bp, Mus musculus
  siRNA target sequence for LOC228796 (NM_199303.1,791-809).
catccaggtggactttagt

SEQ ID NO: 816547 - DNA, 19 bp, Mus musculus
  siRNA target sequence for LOC228796 (NM_199303.1,955-973).
ccttggaagtgaaactcaa

SEQ ID NO: 816548 - DNA, 19 bp, Mus musculus
  siRNA target sequence for LOC228796 (NM_199303.1,977-995).
caagagggttggtaagctt

SEQ ID NO: 816549 - DNA, 19 bp, Mus musculus
  siRNA target sequence for LOC228796 (NM_199303.1,1068-1086).
ctgatcaaggtcaagataa

SEQ ID NO: 816550 - DNA, 19 bp, Mus musculus
  siRNA target sequence for LOC228796 (NM_199303.1,1196-1214).
ccgtctggagactcacatt

SEQ ID NO: 816551 - DNA, 19 bp, Mus musculus
  siRNA target sequence for LOC228796 (NM_199303.1,1262-1280).
cacctctatggacagttta

SEQ ID NO: 816552 - DNA, 19 bp, Mus musculus
  siRNA target sequence for LOC228796 (NM_199303.1,1264-1282).
cctctatggacagtttatt

SEQ ID NO: 816553 - DNA, 19 bp, Mus musculus
  siRNA target sequence for LOC228796 (NM_199303.1,1319-1337).
ccacgaggcggagttaact

SEQ ID NO: 816554 - DNA, 19 bp, Mus musculus
  siRNA target sequence for LOC228796 (NM_199303.1,1414-1432).
cagaccttctggctatcaa

SEQ ID NO: 816555 - DNA, 19 bp, Mus musculus
  siRNA target sequence for LOC228796 (NM_199303.1,1442-1460).
ggctgagctggacatagta

SEQ ID NO: 816556 - DNA, 19 bp, Mus musculus
  siRNA target sequence for LOC228796 (NM_199303.1,1444-1462).
ctgagctggacatagtaga

SEQ ID NO: 816557 - DNA, 19 bp, Mus musculus
  siRNA target sequence for Znf341 (NM_199304.1,103-121).
cacaggacaaagtgtaaat

SEQ ID NO: 816558 - DNA, 19 bp, Mus musculus
  siRNA target sequence for Znf341 (NM_199304.1,149-167).
gacgaggatgtctttctct

SEQ ID NO: 816559 - DNA, 19 bp, Mus musculus
  siRNA target sequence for Znf341 (NM_199304.1,168-186).
gcgggaagtgtaaaaagca

SEQ ID NO: 816560 - DNA, 19 bp, Mus musculus
  siRNA target sequence for Znf341 (NM_199304.1,415-433).
cgatgatgtgcttatgtct

SEQ ID NO: 816561 - DNA, 19 bp, Mus musculus
  siRNA target sequence for Znf341 (NM_199304.1,792-810).
gccctggcaagcaggaatt

SEQ ID NO: 816562 - DNA, 19 bp, Mus musculus
  siRNA target sequence for Znf341 (NM_199304.1,795-813).
ctggcaagcaggaattcaa

SEQ ID NO: 816563 - DNA, 19 bp, Mus musculus
  siRNA target sequence for Znf341 (NM_199304.1,895-913).
gaagaccagacgtgctaaa

SEQ ID NO: 816564 - DNA, 19 bp, Mus musculus
  siRNA target sequence for Znf341 (NM_199304.1,898-916).
gaccagacgtgctaaaggt

SEQ ID NO: 816565 - DNA, 19 bp, Mus musculus
  siRNA target sequence for Znf341 (NM_199304.1,1070-1088).
gcctttgcccagaagtcta

SEQ ID NO: 816566 - DNA, 19 bp, Mus musculus
  siRNA target sequence for Znf341 (NM_199304.1,1071-1089).
cctttgcccagaagtctaa

SEQ ID NO: 816567 - DNA, 19 bp, Mus musculus
  siRNA target sequence for Znf341 (NM_199304.1,1525-1543).
ggacttcccctcactgtat

SEQ ID NO: 816568 - DNA, 19 bp, Mus musculus
  siRNA target sequence for Znf341 (NM_199304.1,1601-1619).
gacagcaccgtctacaagt

SEQ ID NO: 816569 - DNA, 19 bp, Mus musculus
  siRNA target sequence for Znf341 (NM_199304.1,1732-1750).
ctacctgcggcgtcactta

SEQ ID NO: 816570 - DNA, 19 bp, Mus musculus
  siRNA target sequence for Znf341 (NM_199304.1,1924-1942).
ccacgagcccttcaagaaa

SEQ ID NO: 816571 - DNA, 19 bp, Mus musculus
  siRNA target sequence for Znf341 (NM_199304.1,1925-1943).
cacgagcccttcaagaaat

SEQ ID NO: 816572 - DNA, 19 bp, Mus musculus
  siRNA target sequence for Znf341 (NM_199304.1,2105-2123).
gcccacacaggcaactaca

SEQ ID NO: 816573 - DNA, 19 bp, Mus musculus
  siRNA target sequence for Znf341 (NM_199304.1,2149-2167).
gggcttctcacgacacaaa

SEQ ID NO: 816574 - DNA, 19 bp, Mus musculus
  siRNA target sequence for Znf341 (NM_199304.1,2150-2168).
ggcttctcacgacacaaat

SEQ ID NO: 816575 - DNA, 19 bp, Mus musculus
  siRNA target sequence for Znf341 (NM_199304.1,2151-2169).
gcttctcacgacacaaata

SEQ ID NO: 816576 - DNA, 19 bp, Mus musculus
  siRNA target sequence for Znf341 (NM_199304.1,2509-2527).
gctcgccgtcccagtctat

SEQ ID NO: 816577 - DNA, 19 bp, Mus musculus
  siRNA target sequence for Znf341 (NM_199304.1,2510-2528).
ctcgccgtcccagtctata

SEQ ID NO: 816578 - DNA, 19 bp, Mus musculus
  siRNA target sequence for Znf341 (NM_199304.1,2514-2532).
ccgtcccagtctatatcca

SEQ ID NO: 816579 - DNA, 19 bp, Mus musculus
  siRNA target sequence for Znf341 (NM_199304.1,2515-2533).
cgtcccagtctatatccaa

SEQ ID NO: 816580 - DNA, 19 bp, Mus musculus
  siRNA target sequence for MGC59407 (NM_199305.1,141-159).
caacaggacatcttactat

SEQ ID NO: 816581 - DNA, 19 bp, Mus musculus
  siRNA target sequence for MGC59407 (NM_199305.1,199-217).
ggtggaggccactcttcta

SEQ ID NO: 816582 - DNA, 19 bp, Mus musculus
  siRNA target sequence for MGC59407 (NM_199305.1,392-410).
ccctgttcgtgcactacat

SEQ ID NO: 816583 - DNA, 19 bp, Mus musculus
  siRNA target sequence for MGC59407 (NM_199305.1,400-418).
gtgcactacatcaacatct

SEQ ID NO: 816584 - DNA, 19 bp, Mus musculus
  siRNA target sequence for MGC59407 (NM_199305.1,458-476).
cccacacttccctgaactt

SEQ ID NO: 816585 - DNA, 19 bp, Mus musculus
  siRNA target sequence for MGC59407 (NM_199305.1,478-496).
cacctgatcgacttcaact

SEQ ID NO: 816586 - DNA, 19 bp, Mus musculus
  siRNA target sequence for MGC59407 (NM_199305.1,728-746).
cgttcctgcagctgaacta

SEQ ID NO: 816587 - DNA, 19 bp, Mus musculus
  siRNA target sequence for MGC59407 (NM_199305.1,729-747).
gttcctgcagctgaactat

SEQ ID NO: 816588 - DNA, 19 bp, Mus musculus
  siRNA target sequence for MGC59407 (NM_199305.1,818-836).
caaggagtcgggactactt

SEQ ID NO: 816589 - DNA, 19 bp, Mus musculus
  siRNA target sequence for MGC59407 (NM_199305.1,971-989).
ggcgaatgaaggaagtact

SEQ ID NO: 816590 - DNA, 19 bp, Mus musculus
  siRNA target sequence for MGC59407 (NM_199305.1,972-990).
gcgaatgaaggaagtactt

SEQ ID NO: 816591 - DNA, 19 bp, Mus musculus
  siRNA target sequence for MGC59407 (NM_199305.1,974-992).
gaatgaaggaagtacttgt

SEQ ID NO: 816592 - DNA, 19 bp, Mus musculus
  siRNA target sequence for MGC59407 (NM_199305.1,1038-1056).
gtttgtgaagaatacacat

SEQ ID NO: 816593 - DNA, 19 bp, Mus musculus
  siRNA target sequence for MGC59407 (NM_199305.1,1340-1358).
cccacttccgcttccattt

SEQ ID NO: 816594 - DNA, 19 bp, Mus musculus
  siRNA target sequence for LOC230796 (NM_199306.1,278-296).
gctttgaacggcgatatca

SEQ ID NO: 816595 - DNA, 19 bp, Mus musculus
  siRNA target sequence for LOC230796 (NM_199306.1,279-297).
ctttgaacggcgatatcat

SEQ ID NO: 816596 - DNA, 19 bp, Mus musculus
  siRNA target sequence for LOC230796 (NM_199306.1,415-433).
gaccagcacaccattgtgt

SEQ ID NO: 816597 - DNA, 19 bp, Mus musculus
  siRNA target sequence for LOC230796 (NM_199306.1,517-535).
gctggagaccgcattttga

SEQ ID NO: 816598 - DNA, 19 bp, Mus musculus
  siRNA target sequence for LOC230796 (NM_199306.1,518-536).
ctggagaccgcattttgat

SEQ ID NO: 816599 - DNA, 19 bp, Mus musculus
  siRNA target sequence for LOC230796 (NM_199306.1,683-701).
ggcttatccgccagtatga

SEQ ID NO: 816600 - DNA, 19 bp, Mus musculus
  siRNA target sequence for LOC230796 (NM_199306.1,706-724).
cgggagaacagcaaacact

SEQ ID NO: 816601 - DNA, 19 bp, Mus musculus
  siRNA target sequence for LOC230796 (NM_199306.1,732-750).
gctgattgacctaacagaa

SEQ ID NO: 816602 - DNA, 19 bp, Mus musculus
  siRNA target sequence for LOC230796 (NM_199306.1,733-751).
ctgattgacctaacagaat

SEQ ID NO: 816603 - DNA, 19 bp, Mus musculus
  siRNA target sequence for LOC230796 (NM_199306.1,833-851).
cctttgtgaggctctatga

SEQ ID NO: 816604 - DNA, 19 bp, Mus musculus
  siRNA target sequence for LOC230796 (NM_199306.1,842-860).
ggctctatgacattcgaat

SEQ ID NO: 816605 - DNA, 19 bp, Mus musculus
  siRNA target sequence for LOC230796 (NM_199306.1,1076-1094).
gaggagagcaggtgtatct

SEQ ID NO: 816606 - DNA, 19 bp, Mus musculus
  siRNA target sequence for LOC230796 (NM_199306.1,1078-1096).
ggagagcaggtgtatctgt

SEQ ID NO: 816607 - DNA, 19 bp, Mus musculus
  siRNA target sequence for LOC230796 (NM_199306.1,1079-1097).
gagagcaggtgtatctgtt

SEQ ID NO: 816608 - DNA, 19 bp, Mus musculus
  siRNA target sequence for LOC230796 (NM_199306.1,1093-1111).
ctgtttgacttgacttaca

SEQ ID NO: 816609 - DNA, 19 bp, Mus musculus
  siRNA target sequence for LOC230796 (NM_199306.1,1165-1183).
cagaacggcaagatgtcta

SEQ ID NO: 816610 - DNA, 19 bp, Mus musculus
  siRNA target sequence for LOC230796 (NM_199306.1,1442-1460).
gggacggggaccactatga

SEQ ID NO: 816611 - DNA, 19 bp, Mus musculus
  siRNA target sequence for LOC230796 (NM_199306.1,1443-1461).
ggacggggaccactatgat

SEQ ID NO: 816612 - DNA, 19 bp, Mus musculus
  siRNA target sequence for LOC230796 (NM_199306.1,1532-1550).
ggtgcctctttgaactgaa

SEQ ID NO: 816613 - DNA, 19 bp, Mus musculus
  siRNA target sequence for LOC230796 (NM_199306.1,1777-1795).
cggagctacgactatcagt

SEQ ID NO: 816614 - DNA, 19 bp, Mus musculus
  siRNA target sequence for LOC230796 (NM_199306.1,1778-1796).
ggagctacgactatcagtt

SEQ ID NO: 816615 - DNA, 19 bp, Mus musculus
  siRNA target sequence for LOC230796 (NM_199306.1,1854-1872).
cagcaatgctcagtacatt

SEQ ID NO: 816616 - DNA, 19 bp, Mus musculus
  siRNA target sequence for LOC230857 (NM_199307.1,401-419).
gaacgcctccggtatgtct

SEQ ID NO: 816617 - DNA, 19 bp, Mus musculus
  siRNA target sequence for LOC230857 (NM_199307.1,647-665).
gaaaagcccaagtgtacta

SEQ ID NO: 816618 - DNA, 19 bp, Mus musculus
  siRNA target sequence for LOC230857 (NM_199307.1,667-685).
cgtgcgtgcatgaacgaaa

SEQ ID NO: 816619 - DNA, 19 bp, Mus musculus
  siRNA target sequence for LOC230857 (NM_199307.1,670-688).
gcgtgcatgaacgaaacta

SEQ ID NO: 816620 - DNA, 19 bp, Mus musculus
  siRNA target sequence for LOC230857 (NM_199307.1,675-693).
catgaacgaaactaggatt

SEQ ID NO: 816621 - DNA, 19 bp, Mus musculus
  siRNA target sequence for LOC230857 (NM_199307.1,824-842).
ccttcttctctgtttatgt

SEQ ID NO: 816622 - DNA, 19 bp, Mus musculus
  siRNA target sequence for LOC230857 (NM_199307.1,843-861).
cagcgcggactccaagaat

SEQ ID NO: 816623 - DNA, 19 bp, Mus musculus
  siRNA target sequence for LOC230857 (NM_199307.1,847-865).
gcggactccaagaattcca

SEQ ID NO: 816624 - DNA, 19 bp, Mus musculus
  siRNA target sequence for LOC230857 (NM_199307.1,848-866).
cggactccaagaattccaa

SEQ ID NO: 816625 - DNA, 19 bp, Mus musculus
  siRNA target sequence for LOC230857 (NM_199307.1,1192-1210).
ccagtggagatcaatgagt

SEQ ID NO: 816626 - DNA, 19 bp, Mus musculus
  siRNA target sequence for LOC230857 (NM_199307.1,1225-1243).
gtctacgacaaggaatact

SEQ ID NO: 816627 - DNA, 19 bp, Mus musculus
  siRNA target sequence for LOC230857 (NM_199307.1,1266-1284).
caacaacaccgacaaatgt

SEQ ID NO: 816628 - DNA, 19 bp, Mus musculus
  siRNA target sequence for LOC230857 (NM_199307.1,1283-1301).
gtctgctcaacaactacat

SEQ ID NO: 816629 - DNA, 19 bp, Mus musculus
  siRNA target sequence for LOC230857 (NM_199307.1,1288-1306).
ctcaacaactacatgatgt

SEQ ID NO: 816630 - DNA, 19 bp, Mus musculus
  siRNA target sequence for LOC230857 (NM_199307.1,1308-1326).
gaacctggtacgcaaaaca

SEQ ID NO: 816631 - DNA, 19 bp, Mus musculus
  siRNA target sequence for LOC230857 (NM_199307.1,1354-1372).
gacgccgacgagaagttca

SEQ ID NO: 816632 - DNA, 19 bp, Mus musculus
  siRNA target sequence for LOC230857 (NM_199307.1,1368-1386).
gttcatggaggttatgtat

SEQ ID NO: 816633 - DNA, 19 bp, Mus musculus
  siRNA target sequence for LOC230857 (NM_199307.1,1409-1427).
cccgctggaagttttgtgt

SEQ ID NO: 816634 - DNA, 19 bp, Mus musculus
  siRNA target sequence for LOC230857 (NM_199307.1,1461-1479).
gggacccatgtttgtgaaa

SEQ ID NO: 816635 - DNA, 19 bp, Mus musculus
  siRNA target sequence for LOC230857 (NM_199307.1,1465-1483).
cccatgtttgtgaaagcaa

SEQ ID NO: 816636 - DNA, 19 bp, Mus musculus
  siRNA target sequence for LOC230857 (NM_199307.1,1609-1627).
gcggatgctatctacaaca

SEQ ID NO: 816637 - DNA, 19 bp, Mus musculus
  siRNA target sequence for LOC230857 (NM_199307.1,1610-1628).
cggatgctatctacaacat

SEQ ID NO: 816638 - DNA, 19 bp, Mus musculus
  siRNA target sequence for LOC230857 (NM_199307.1,1633-1651).
ggctaccccaacttcatca

SEQ ID NO: 816639 - DNA, 19 bp, Mus musculus
  siRNA target sequence for LOC230857 (NM_199307.1,1669-1687).
gacaaagtcttcaatgact

SEQ ID NO: 816640 - DNA, 19 bp, Mus musculus
  siRNA target sequence for LOC230857 (NM_199307.1,1726-1744).
cgctttttcaacttctcat

SEQ ID NO: 816641 - DNA, 19 bp, Mus musculus
  siRNA target sequence for LOC230857 (NM_199307.1,1808-1826).
ccatggtgaacgcttacta

SEQ ID NO: 816642 - DNA, 19 bp, Mus musculus
  siRNA target sequence for LOC230857 (NM_199307.1,1944-1962).
gctgactcacgctttcgat

SEQ ID NO: 816643 - DNA, 19 bp, Mus musculus
  siRNA target sequence for LOC230857 (NM_199307.1,1949-1967).
ctcacgctttcgatgatca

SEQ ID NO: 816644 - DNA, 19 bp, Mus musculus
  siRNA target sequence for LOC234385 (NM_199308.1,1615-1633).
cagagcgtcgggattcctt

SEQ ID NO: 816645 - DNA, 19 bp, Mus musculus
  siRNA target sequence for LOC234385 (NM_199308.1,1620-1638).
cgtcgggattccttcaaga

SEQ ID NO: 816646 - DNA, 19 bp, Mus musculus
  siRNA target sequence for LOC234385 (NM_199308.1,1621-1639).
gtcgggattccttcaagaa

SEQ ID NO: 816647 - DNA, 19 bp, Mus musculus
  siRNA target sequence for MGC58833 (NM_199309.1,225-243).
cgtgtttgctgccttcaat

SEQ ID NO: 816648 - DNA, 19 bp, Mus musculus
  siRNA target sequence for MGC58833 (NM_199309.1,244-262).
gtaacgctgctgctgtttt

SEQ ID NO: 816649 - DNA, 19 bp, Mus musculus
  siRNA target sequence for MGC58833 (NM_199309.1,365-383).
gtctcgtctcgctcaactt

SEQ ID NO: 816650 - DNA, 19 bp, Mus musculus
  siRNA target sequence for MGC58833 (NM_199309.1,386-404).
cagaccctggtatcttaca

SEQ ID NO: 816651 - DNA, 19 bp, Mus musculus
  siRNA target sequence for MGC58833 (NM_199309.1,428-446).
ccatgacggtgcatgttgt

SEQ ID NO: 816652 - DNA, 19 bp, Mus musculus
  siRNA target sequence for MGC58833 (NM_199309.1,442-460).
gttgttcgagtgaaccaaa

SEQ ID NO: 816653 - DNA, 19 bp, Mus musculus
  siRNA target sequence for MGC58833 (NM_199309.1,522-540).
ctgcccgtggtgcaacatt

SEQ ID NO: 816654 - DNA, 19 bp, Mus musculus
  siRNA target sequence for MGC58833 (NM_199309.1,663-681).
ctgcctgacattcctattt

SEQ ID NO: 816655 - DNA, 19 bp, Mus musculus
  siRNA target sequence for MGC58833 (NM_199309.1,740-758).
ccgctgcgggctttttgat

SEQ ID NO: 816656 - DNA, 19 bp, Mus musculus
  siRNA target sequence for MGC58833 (NM_199309.1,741-759).
cgctgcgggctttttgatt

SEQ ID NO: 816657 - DNA, 19 bp, Mus musculus
  siRNA target sequence for MGC58833 (NM_199309.1,833-851).
ggtaccatccggaatacaa

SEQ ID NO: 816658 - DNA, 19 bp, Mus musculus
  siRNA target sequence for MGC58833 (NM_199309.1,842-860).
cggaatacaacccttttga

SEQ ID NO: 816659 - DNA, 19 bp, Mus musculus
  siRNA target sequence for MGC58833 (NM_199309.1,899-917).
caccactgggtcccaatta

SEQ ID NO: 816660 - DNA, 19 bp, Mus musculus
  siRNA target sequence for MGC58833 (NM_199309.1,902-920).
cactgggtcccaattacat

SEQ ID NO: 816661 - DNA, 19 bp, Mus musculus
  siRNA target sequence for MGC58833 (NM_199309.1,904-922).
ctgggtcccaattacatgt

SEQ ID NO: 816662 - DNA, 19 bp, Mus musculus
  siRNA target sequence for MGC58833 (NM_199309.1,989-1007).
caccacgtcgtcctaaaca

SEQ ID NO: 816663 - DNA, 19 bp, Mus musculus
  siRNA target sequence for MGC58833 (NM_199309.1,991-1009).
ccacgtcgtcctaaacact

SEQ ID NO: 816664 - DNA, 19 bp, Mus musculus
  siRNA target sequence for MGC60849 (NM_199310.1,355-373).
gaactctggcccaagctaa

SEQ ID NO: 816665 - DNA, 19 bp, Mus musculus
  siRNA target sequence for MGC60849 (NM_199310.1,473-491).
gtggctccagccagataaa

SEQ ID NO: 816666 - DNA, 19 bp, Mus musculus
  siRNA target sequence for MGC60849 (NM_199310.1,569-587).
gccagcggcagcagaacaa

SEQ ID NO: 816667 - DNA, 19 bp, Mus musculus
  siRNA target sequence for MGC58365 (NM_199312.1,244-262).
gaggcttggaggacataca

SEQ ID NO: 816668 - DNA, 19 bp, Mus musculus
  siRNA target sequence for MGC58365 (NM_199312.1,354-372).
gaagtgctcctactacatt

SEQ ID NO: 816669 - DNA, 19 bp, Mus musculus
  siRNA target sequence for MGC58365 (NM_199312.1,359-377).
gctcctactacattgagat

SEQ ID NO: 816670 - DNA, 19 bp, Mus musculus
  siRNA target sequence for MGC58365 (NM_199312.1,554-572).
cactggatgccctacttga

SEQ ID NO: 816671 - DNA, 19 bp, Mus musculus
  siRNA target sequence for MGC58365 (NM_199312.1,629-647).
cagacctatcagttgtcat

SEQ ID NO: 816672 - DNA, 19 bp, Mus musculus
  siRNA target sequence for MGC58365 (NM_199312.1,752-770).
gcacgaagatgccagttat

SEQ ID NO: 816673 - DNA, 19 bp, Mus musculus
  siRNA target sequence for MGC58365 (NM_199312.1,755-773).
cgaagatgccagttatgtt

SEQ ID NO: 816674 - DNA, 19 bp, Mus musculus
  siRNA target sequence for MGC58365 (NM_199312.1,810-828).
cagcctgcgctggtttgta

SEQ ID NO: 816675 - DNA, 19 bp, Mus musculus
  siRNA target sequence for MGC58365 (NM_199312.1,927-945).
ggctgcctgcacctttgat

SEQ ID NO: 816676 - DNA, 19 bp, Mus musculus
  siRNA target sequence for MGC58365 (NM_199312.1,961-979).
cccaaccgtacctacaagt

SEQ ID NO: 816677 - DNA, 19 bp, Mus musculus
  siRNA target sequence for MGC58365 (NM_199312.1,962-980).
ccaaccgtacctacaagtt

SEQ ID NO: 816678 - DNA, 19 bp, Mus musculus
  siRNA target sequence for MGC58365 (NM_199312.1,967-985).
cgtacctacaagttcacta

SEQ ID NO: 816679 - DNA, 19 bp, Mus musculus
  siRNA target sequence for MGC58365 (NM_199312.1,968-986).
gtacctacaagttcactat

SEQ ID NO: 816680 - DNA, 19 bp, Mus musculus
  siRNA target sequence for MGC37881 (NM_199314.1,1000-1018).
gcacctgccaaggttttca

SEQ ID NO: 816681 - DNA, 19 bp, Mus musculus
  siRNA target sequence for MGC37881 (NM_199314.1,1001-1019).
cacctgccaaggttttcaa

SEQ ID NO: 816682 - DNA, 19 bp, Mus musculus
  siRNA target sequence for MGC37881 (NM_199314.1,1017-1035).
caatttccgcaacttacaa

SEQ ID NO: 816683 - DNA, 19 bp, Mus musculus
  siRNA target sequence for MGC37881 (NM_199314.1,1078-1096).
cgacatggaagctgactta

SEQ ID NO: 816684 - DNA, 19 bp, Mus musculus
  siRNA target sequence for MGC37881 (NM_199314.1,1079-1097).
gacatggaagctgacttat

SEQ ID NO: 816685 - DNA, 19 bp, Mus musculus
  siRNA target sequence for MGC37881 (NM_199314.1,1101-1119).
gaattatggggcaactcaa

SEQ ID NO: 816686 - DNA, 19 bp, Mus musculus
  siRNA target sequence for MGC37881 (NM_199314.1,1108-1126).
ggggcaactcaacaaaact

SEQ ID NO: 816687 - DNA, 19 bp, Mus musculus
  siRNA target sequence for MGC37881 (NM_199314.1,1110-1128).
ggcaactcaacaaaactgt

SEQ ID NO: 816688 - DNA, 19 bp, Mus musculus
  siRNA target sequence for MGC37881 (NM_199314.1,1235-1253).
gccccacaggcccactata

SEQ ID NO: 816689 - DNA, 19 bp, Mus musculus
  siRNA target sequence for 4922501C03Rik (NM_199316.1,335-353).
ggaggaatctgctgaaaaa

SEQ ID NO: 816690 - DNA, 19 bp, Mus musculus
  siRNA target sequence for 4922501C03Rik (NM_199316.1,376-394).
gaacctccatcttaagtgt

SEQ ID NO: 816691 - DNA, 19 bp, Mus musculus
  siRNA target sequence for 4922501C03Rik (NM_199316.1,398-416).
cagcttagaagctaatgaa

SEQ ID NO: 816692 - DNA, 19 bp, Mus musculus
  siRNA target sequence for 4922501C03Rik (NM_199316.1,400-418).
gcttagaagctaatgaatt

SEQ ID NO: 816693 - DNA, 19 bp, Mus musculus
  siRNA target sequence for 4922501C03Rik (NM_199316.1,455-473).
gggcttggacacgttagaa

SEQ ID NO: 816694 - DNA, 19 bp, Mus musculus
  siRNA target sequence for 4922501C03Rik (NM_199316.1,458-476).
cttggacacgttagaagaa

SEQ ID NO: 816695 - DNA, 19 bp, Mus musculus
  siRNA target sequence for 4922501C03Rik (NM_199316.1,461-479).
ggacacgttagaagaacaa

SEQ ID NO: 816696 - DNA, 19 bp, Mus musculus
  siRNA target sequence for 4922501C03Rik (NM_199316.1,521-539).
gacgtcttctattgattat

SEQ ID NO: 816697 - DNA, 19 bp, Mus musculus
  siRNA target sequence for 4922501C03Rik (NM_199316.1,526-544).
cttctattgattattcgaa

SEQ ID NO: 816698 - DNA, 19 bp, Mus musculus
  siRNA target sequence for 4922501C03Rik (NM_199316.1,565-583).
ctgacgactctgcacaatt

SEQ ID NO: 816699 - DNA, 19 bp, Mus musculus
  siRNA target sequence for 4922501C03Rik (NM_199316.1,567-585).
gacgactctgcacaattga

SEQ ID NO: 816700 - DNA, 19 bp, Mus musculus
  siRNA target sequence for 4922501C03Rik (NM_199316.1,594-612).
catagatatccacgtaata

SEQ ID NO: 816701 - DNA, 19 bp, Mus musculus
  siRNA target sequence for 4922501C03Rik (NM_199316.1,598-616).
gatatccacgtaatacaga

SEQ ID NO: 816702 - DNA, 19 bp, Mus musculus
  siRNA target sequence for 4922501C03Rik (NM_199316.1,670-688).
cgtacagtgatgattttga

SEQ ID NO: 816703 - DNA, 19 bp, Mus musculus
  siRNA target sequence for 4922501C03Rik (NM_199316.1,702-720).
gctgatgatcctttgatta

SEQ ID NO: 816704 - DNA, 19 bp, Mus musculus
  siRNA target sequence for 4922501C03Rik (NM_199316.1,705-723).
gatgatcctttgattacta

SEQ ID NO: 816705 - DNA, 19 bp, Mus musculus
  siRNA target sequence for 4922501C03Rik (NM_199316.1,832-850).
cggctgacttgctgtatga

SEQ ID NO: 816706 - DNA, 19 bp, Mus musculus
  siRNA target sequence for Phf16 (NM_199317.1,90-108).
gtcaaaaaatcctaaggaa

SEQ ID NO: 816707 - DNA, 19 bp, Mus musculus
  siRNA target sequence for Phf16 (NM_199317.1,141-159).
cctcatcagtgccatgaaa

SEQ ID NO: 816708 - DNA, 19 bp, Mus musculus
  siRNA target sequence for Phf16 (NM_199317.1,144-162).
catcagtgccatgaaaatt

SEQ ID NO: 816709 - DNA, 19 bp, Mus musculus
  siRNA target sequence for Phf16 (NM_199317.1,147-165).
cagtgccatgaaaattcct

SEQ ID NO: 816710 - DNA, 19 bp, Mus musculus
  siRNA target sequence for Phf16 (NM_199317.1,168-186).
ctctcaccatgttaatcct

SEQ ID NO: 816711 - DNA, 19 bp, Mus musculus
  siRNA target sequence for Phf16 (NM_199317.1,178-196).
gttaatcctgacagctatt

SEQ ID NO: 816712 - DNA, 19 bp, Mus musculus
  siRNA target sequence for Phf16 (NM_199317.1,187-205).
gacagctattacctcttta

SEQ ID NO: 816713 - DNA, 19 bp, Mus musculus
  siRNA target sequence for Phf16 (NM_199317.1,191-209).
gctattacctctttactga

SEQ ID NO: 816714 - DNA, 19 bp, Mus musculus
  siRNA target sequence for Phf16 (NM_199317.1,206-224).
ctgacacatggaaagaaga

SEQ ID NO: 816715 - DNA, 19 bp, Mus musculus
  siRNA target sequence for Phf16 (NM_199317.1,272-290).
cgccgtctctcaggattat

SEQ ID NO: 816716 - DNA, 19 bp, Mus musculus
  siRNA target sequence for Phf16 (NM_199317.1,274-292).
ccgtctctcaggattatat

SEQ ID NO: 816717 - DNA, 19 bp, Mus musculus
  siRNA target sequence for Phf16 (NM_199317.1,276-294).
gtctctcaggattatatct

SEQ ID NO: 816718 - DNA, 19 bp, Mus musculus
  siRNA target sequence for Phf16 (NM_199317.1,278-296).
ctctcaggattatatctga

SEQ ID NO: 816719 - DNA, 19 bp, Mus musculus
  siRNA target sequence for Phf16 (NM_199317.1,361-379).
gcagaacctggctatatca

SEQ ID NO: 816720 - DNA, 19 bp, Mus musculus
  siRNA target sequence for Phf16 (NM_199317.1,364-382).
gaacctggctatatcaata

SEQ ID NO: 816721 - DNA, 19 bp, Mus musculus
  siRNA target sequence for Phf16 (NM_199317.1,418-436).
ctagatgacatggatatct

SEQ ID NO: 816722 - DNA, 19 bp, Mus musculus
  siRNA target sequence for Phf16 (NM_199317.1,440-458).
ggcttcaggaactcaatga

SEQ ID NO: 816723 - DNA, 19 bp, Mus musculus
  siRNA target sequence for Phf16 (NM_199317.1,474-492).
gggttatggcccaattgat

SEQ ID NO: 816724 - DNA, 19 bp, Mus musculus
  siRNA target sequence for Phf16 (NM_199317.1,476-494).
gttatggcccaattgatga

SEQ ID NO: 816725 - DNA, 19 bp, Mus musculus
  siRNA target sequence for Phf16 (NM_199317.1,484-502).
ccaattgatgagactctta

SEQ ID NO: 816726 - DNA, 19 bp, Mus musculus
  siRNA target sequence for Phf16 (NM_199317.1,490-508).
gatgagactcttatggaaa

SEQ ID NO: 816727 - DNA, 19 bp, Mus musculus
  siRNA target sequence for Phf16 (NM_199317.1,495-513).
gactcttatggaaaagaca

SEQ ID NO: 816728 - DNA, 19 bp, Mus musculus
  siRNA target sequence for Phf16 (NM_199317.1,504-522).
ggaaaagacaatagaagtt

SEQ ID NO: 816729 - DNA, 19 bp, Mus musculus
  siRNA target sequence for Phf16 (NM_199317.1,529-547).
cgccactgccatgaaaata

SEQ ID NO: 816730 - DNA, 19 bp, Mus musculus
  siRNA target sequence for Phf16 (NM_199317.1,549-567).
gaaccatgctattgaaaca

SEQ ID NO: 816731 - DNA, 19 bp, Mus musculus
  siRNA target sequence for Phf16 (NM_199317.1,632-650).
gtgaagaagggaatgatat

SEQ ID NO: 816732 - DNA, 19 bp, Mus musculus
  siRNA target sequence for Phf16 (NM_199317.1,637-655).
gaagggaatgatatggtat

SEQ ID NO: 816733 - DNA, 19 bp, Mus musculus
  siRNA target sequence for Phf16 (NM_199317.1,640-658).
gggaatgatatggtattct

SEQ ID NO: 816734 - DNA, 19 bp, Mus musculus
  siRNA target sequence for Phf16 (NM_199317.1,642-660).
gaatgatatggtattctgt

SEQ ID NO: 816735 - DNA, 19 bp, Mus musculus
  siRNA target sequence for Phf16 (NM_199317.1,646-664).
gatatggtattctgtgata

SEQ ID NO: 816736 - DNA, 19 bp, Mus musculus
  siRNA target sequence for Phf16 (NM_199317.1,666-684).
gtgtaacgtctgtgtacat

SEQ ID NO: 816737 - DNA, 19 bp, Mus musculus
  siRNA target sequence for Phf16 (NM_199317.1,692-710).
gctatggcattctcaagat

SEQ ID NO: 816738 - DNA, 19 bp, Mus musculus
  siRNA target sequence for Phf16 (NM_199317.1,801-819).
caccagaacagggactaaa

SEQ ID NO: 816739 - DNA, 19 bp, Mus musculus
  siRNA target sequence for Phf16 (NM_199317.1,935-953).
gcaacctgtgcaagttgaa

SEQ ID NO: 816740 - DNA, 19 bp, Mus musculus
  siRNA target sequence for Phf16 (NM_199317.1,989-1007).
gtatcactgcctttcatgt

SEQ ID NO: 816741 - DNA, 19 bp, Mus musculus
  siRNA target sequence for Phf16 (NM_199317.1,1021-1039).
gagcacggcctggaaatga

SEQ ID NO: 816742 - DNA, 19 bp, Mus musculus
  siRNA target sequence for Phf16 (NM_199317.1,1057-1075).
ggggatgaagtaaagttca

SEQ ID NO: 816743 - DNA, 19 bp, Mus musculus
  siRNA target sequence for Phf16 (NM_199317.1,1158-1176).
ccaggcaaaaagtgagaaa

SEQ ID NO: 816744 - DNA, 19 bp, Mus musculus
  siRNA target sequence for Phf16 (NM_199317.1,1194-1212).
gaagcttcgtgaactagaa

SEQ ID NO: 816745 - DNA, 19 bp, Mus musculus
  siRNA target sequence for Phf16 (NM_199317.1,1207-1225).
ctagaagaagaattctata

SEQ ID NO: 816746 - DNA, 19 bp, Mus musculus
  siRNA target sequence for Phf16 (NM_199317.1,1226-1244).
ccttagtccaggtagaaga

SEQ ID NO: 816747 - DNA, 19 bp, Mus musculus
  siRNA target sequence for Phf16 (NM_199317.1,1249-1267).
gccaaagagatggagttat

SEQ ID NO: 816748 - DNA, 19 bp, Mus musculus
  siRNA target sequence for Phf16 (NM_199317.1,1251-1269).
caaagagatggagttatct

SEQ ID NO: 816749 - DNA, 19 bp, Mus musculus
  siRNA target sequence for Phf16 (NM_199317.1,1270-1288).
gcgttcactgtcgatttta

SEQ ID NO: 816750 - DNA, 19 bp, Mus musculus
  siRNA target sequence for Phf16 (NM_199317.1,1271-1289).
cgttcactgtcgattttat

SEQ ID NO: 816751 - DNA, 19 bp, Mus musculus
  siRNA target sequence for Phf16 (NM_199317.1,1279-1297).
gtcgattttatctataact

SEQ ID NO: 816752 - DNA, 19 bp, Mus musculus
  siRNA target sequence for Phf16 (NM_199317.1,1290-1308).
ctataactactggaaacta

SEQ ID NO: 816753 - DNA, 19 bp, Mus musculus
  siRNA target sequence for Phf16 (NM_199317.1,1311-1329).
gcgcaaaagcaacttcaat

SEQ ID NO: 816754 - DNA, 19 bp, Mus musculus
  siRNA target sequence for Phf16 (NM_199317.1,1312-1330).
cgcaaaagcaacttcaata

SEQ ID NO: 816755 - DNA, 19 bp, Mus musculus
  siRNA target sequence for Phf16 (NM_199317.1,2031-2049).
cacccagaaagttaattca

SEQ ID NO: 816756 - DNA, 19 bp, Mus musculus
  siRNA target sequence for Phf16 (NM_199317.1,2034-2052).
ccagaaagttaattcaagt

SEQ ID NO: 816757 - DNA, 19 bp, Mus musculus
  siRNA target sequence for Phf16 (NM_199317.1,2374-2392).
gagagttctgacagagaaa

SEQ ID NO: 816758 - DNA, 19 bp, Mus musculus
  siRNA target sequence for LOC382890 (NM_199318.1,350-368).
cgagaaggacagtcttgaa

SEQ ID NO: 816759 - DNA, 19 bp, Mus musculus
  siRNA target sequence for LOC382890 (NM_199318.1,417-435).
gaggatcccggcttgtttt

SEQ ID NO: 816760 - DNA, 19 bp, Mus musculus
  siRNA target sequence for LOC382890 (NM_199318.1,470-488).
cttcgtttcaggaaacctt

SEQ ID NO: 816761 - DNA, 19 bp, Mus musculus
  siRNA target sequence for LOC382890 (NM_199318.1,732-750).
ggtcagcagcccagtttca

SEQ ID NO: 816762 - DNA, 19 bp, Mus musculus
  siRNA target sequence for LOC382890 (NM_199318.1,912-930).
gccaggggaaatgaaaaga

SEQ ID NO: 816763 - DNA, 19 bp, Mus musculus
  siRNA target sequence for LOC382890 (NM_199318.1,968-986).
cagcattgagcgtctgtat

SEQ ID NO: 816764 - DNA, 19 bp, Mus musculus
  siRNA target sequence for AW907654 (NM_199322.1,332-350).
gatgctgctcatgagatta

SEQ ID NO: 816765 - DNA, 19 bp, Mus musculus
  siRNA target sequence for AW907654 (NM_199322.1,421-439).
cgactacgacaccaaaagt

SEQ ID NO: 816766 - DNA, 19 bp, Mus musculus
  siRNA target sequence for AW907654 (NM_199322.1,427-445).
cgacaccaaaagttttgaa

SEQ ID NO: 816767 - DNA, 19 bp, Mus musculus
  siRNA target sequence for AW907654 (NM_199322.1,451-469).
gcagcggctgtgtgacaaa

SEQ ID NO: 816768 - DNA, 19 bp, Mus musculus
  siRNA target sequence for AW907654 (NM_199322.1,602-620).
ccggagaagcttaacaact

SEQ ID NO: 816769 - DNA, 19 bp, Mus musculus
  siRNA target sequence for AW907654 (NM_199322.1,603-621).
cggagaagcttaacaacta

SEQ ID NO: 816770 - DNA, 19 bp, Mus musculus
  siRNA target sequence for AW907654 (NM_199322.1,699-717).
cagaggatgacctgtttgt

SEQ ID NO: 816771 - DNA, 19 bp, Mus musculus
  siRNA target sequence for AW907654 (NM_199322.1,765-783).
ccaccaactgcaaacatca

SEQ ID NO: 816772 - DNA, 19 bp, Mus musculus
  siRNA target sequence for AW907654 (NM_199322.1,847-865).
gaagtggatgaaatggtat

SEQ ID NO: 816773 - DNA, 19 bp, Mus musculus
  siRNA target sequence for AW907654 (NM_199322.1,852-870).
ggatgaaatggtatggaaa

SEQ ID NO: 816774 - DNA, 19 bp, Mus musculus
  siRNA target sequence for AW907654 (NM_199322.1,934-952).
cgccaacacgagtgttata

SEQ ID NO: 816775 - DNA, 19 bp, Mus musculus
  siRNA target sequence for AW907654 (NM_199322.1,935-953).
gccaacacgagtgttatat

SEQ ID NO: 816776 - DNA, 19 bp, Mus musculus
  siRNA target sequence for AW907654 (NM_199322.1,936-954).
ccaacacgagtgttatatt

SEQ ID NO: 816777 - DNA, 19 bp, Mus musculus
  siRNA target sequence for AW907654 (NM_199322.1,937-955).
caacacgagtgttatattt

SEQ ID NO: 816778 - DNA, 19 bp, Mus musculus
  siRNA target sequence for AW907654 (NM_199322.1,943-961).
gagtgttatatttgtgaat

SEQ ID NO: 816779 - DNA, 19 bp, Mus musculus
  siRNA target sequence for AW907654 (NM_199322.1,1001-1019).
gagcgattcgcaaacatga

SEQ ID NO: 816780 - DNA, 19 bp, Mus musculus
  siRNA target sequence for AW907654 (NM_199322.1,1021-1039).
ggaaggcggcagaatcgta

SEQ ID NO: 816781 - DNA, 19 bp, Mus musculus
  siRNA target sequence for AW907654 (NM_199322.1,1022-1040).
gaaggcggcagaatcgtat

SEQ ID NO: 816782 - DNA, 19 bp, Mus musculus
  siRNA target sequence for AW907654 (NM_199322.1,1190-1208).
gaccgcaccatacttgaaa

SEQ ID NO: 816783 - DNA, 19 bp, Mus musculus
  siRNA target sequence for AW907654 (NM_199322.1,1193-1211).
cgcaccatacttgaaaact

SEQ ID NO: 816784 - DNA, 19 bp, Mus musculus
  siRNA target sequence for AW907654 (NM_199322.1,1194-1212).
gcaccatacttgaaaacta

SEQ ID NO: 816785 - DNA, 19 bp, Mus musculus
  siRNA target sequence for AW907654 (NM_199322.1,1497-1515).
gtgccgaacgcaagtctaa

SEQ ID NO: 816786 - DNA, 19 bp, Mus musculus
  siRNA target sequence for AW907654 (NM_199322.1,1499-1517).
gccgaacgcaagtctaaga

SEQ ID NO: 816787 - DNA, 19 bp, Mus musculus
  siRNA target sequence for AW907654 (NM_199322.1,1500-1518).
ccgaacgcaagtctaagaa

SEQ ID NO: 816788 - DNA, 19 bp, Mus musculus
  siRNA target sequence for AW907654 (NM_199322.1,1502-1520).
gaacgcaagtctaagaaga

SEQ ID NO: 816789 - DNA, 19 bp, Mus musculus
  siRNA target sequence for AW907654 (NM_199322.1,1676-1694).
cctgcgctgcagaagcttt

SEQ ID NO: 816790 - DNA, 19 bp, Mus musculus
  siRNA target sequence for AW907654 (NM_199322.1,1677-1695).
ctgcgctgcagaagctttt

SEQ ID NO: 816791 - DNA, 19 bp, Mus musculus
  siRNA target sequence for AW907654 (NM_199322.1,1680-1698).
cgctgcagaagcttttaga

SEQ ID NO: 816792 - DNA, 19 bp, Mus musculus
  siRNA target sequence for AW907654 (NM_199322.1,1720-1738).
gcagttcctggcttataca

SEQ ID NO: 816793 - DNA, 19 bp, Mus musculus
  siRNA target sequence for AW907654 (NM_199322.1,1747-1765).
gcagtacaaggctaaccta

SEQ ID NO: 816794 - DNA, 19 bp, Mus musculus
  siRNA target sequence for AW907654 (NM_199322.1,1911-1929).
cctacaatgacctgattca

SEQ ID NO: 816795 - DNA, 19 bp, Mus musculus
  siRNA target sequence for AW907654 (NM_199322.1,2215-2233).
ctgtgtaccaccagatgat

SEQ ID NO: 816796 - DNA, 19 bp, Mus musculus
  siRNA target sequence for AW907654 (NM_199322.1,2526-2544).
gcctggctttgcctgatta

SEQ ID NO: 816797 - DNA, 19 bp, Mus musculus
  siRNA target sequence for AW907654 (NM_199322.1,2528-2546).
ctggctttgcctgattaca

SEQ ID NO: 816798 - DNA, 19 bp, Mus musculus
  siRNA target sequence for AW907654 (NM_199322.1,2551-2569).
gttgtcacctgccaagatt

SEQ ID NO: 816799 - DNA, 19 bp, Mus musculus
  siRNA target sequence for AW907654 (NM_199322.1,2750-2768).
ctcacctccgagaaaggta

SEQ ID NO: 816800 - DNA, 19 bp, Mus musculus
  siRNA target sequence for AW907654 (NM_199322.1,3110-3128).
ctggcctctggaatggaat

SEQ ID NO: 816801 - DNA, 19 bp, Mus musculus
  siRNA target sequence for AW907654 (NM_199322.1,3352-3370).
cccagagagcgaagcaaaa

SEQ ID NO: 816802 - DNA, 19 bp, Mus musculus
  siRNA target sequence for AW907654 (NM_199322.1,3600-3618).
cctcggggtctcctcttaa

SEQ ID NO: 816803 - DNA, 19 bp, Mus musculus
  siRNA target sequence for AW907654 (NM_199322.1,3601-3619).
ctcggggtctcctcttaat

SEQ ID NO: 816804 - DNA, 19 bp, Mus musculus
  siRNA target sequence for AW907654 (NM_199322.1,3603-3621).
cggggtctcctcttaatct

SEQ ID NO: 816805 - DNA, 19 bp, Mus musculus
  siRNA target sequence for AW907654 (NM_199322.1,3605-3623).
gggtctcctcttaatctca

SEQ ID NO: 816806 - DNA, 19 bp, Mus musculus
  siRNA target sequence for AW907654 (NM_199322.1,3749-3767).
cggcctctaggactaacta

SEQ ID NO: 816807 - DNA, 19 bp, Mus musculus
  siRNA target sequence for AW907654 (NM_199322.1,3750-3768).
ggcctctaggactaactaa

SEQ ID NO: 816808 - DNA, 19 bp, Mus musculus
  siRNA target sequence for AW907654 (NM_199322.1,3751-3769).
gcctctaggactaactaat

SEQ ID NO: 816809 - DNA, 19 bp, Mus musculus
  siRNA target sequence for AW907654 (NM_199322.1,3825-3843).
ccagcagtgcccgaattga

SEQ ID NO: 816810 - DNA, 19 bp, Mus musculus
  siRNA target sequence for AW907654 (NM_199322.1,3831-3849).
gtgcccgaattgagagaaa

SEQ ID NO: 816811 - DNA, 19 bp, Mus musculus
  siRNA target sequence for AW907654 (NM_199322.1,3833-3851).
gcccgaattgagagaaaaa

SEQ ID NO: 816812 - DNA, 19 bp, Mus musculus
  siRNA target sequence for AW907654 (NM_199322.1,3834-3852).
cccgaattgagagaaaaat

SEQ ID NO: 816813 - DNA, 19 bp, Mus musculus
  siRNA target sequence for AW907654 (NM_199322.1,3835-3853).
ccgaattgagagaaaaatt

SEQ ID NO: 816814 - DNA, 19 bp, Mus musculus
  siRNA target sequence for AW907654 (NM_199322.1,3944-3962).
cctatcaacagcagcaaat

SEQ ID NO: 816815 - DNA, 19 bp, Mus musculus
  siRNA target sequence for AW907654 (NM_199322.1,4219-4237).
cggtttacacagcttcaat

SEQ ID NO: 816816 - DNA, 19 bp, Mus musculus
  siRNA target sequence for AW907654 (NM_199322.1,4221-4239).
gtttacacagcttcaatga

SEQ ID NO: 816817 - DNA, 19 bp, Mus musculus
  siRNA target sequence for AW907654 (NM_199322.1,4566-4584).
gccctggtcttgtaactgt

SEQ ID NO: 816818 - DNA, 19 bp, Mus musculus
  siRNA target sequence for AW907654 (NM_199322.1,4840-4858).
cggaaccgttggaggtaat

SEQ ID NO: 816819 - DNA, 19 bp, Mus musculus
  siRNA target sequence for AW907654 (NM_199322.1,4841-4859).
ggaaccgttggaggtaatt

SEQ ID NO: 816820 - DNA, 19 bp, Mus musculus
  siRNA target sequence for LOC211134 (NM_199364.1,53-71).
gccgtgcttcacagtacaa

SEQ ID NO: 816821 - DNA, 19 bp, Mus musculus
  siRNA target sequence for LOC211134 (NM_199364.1,91-109).
ctcaagaagctcaatcgat

SEQ ID NO: 816822 - DNA, 19 bp, Mus musculus
  siRNA target sequence for LOC211134 (NM_199364.1,96-114).
gaagctcaatcgatactca

SEQ ID NO: 816823 - DNA, 19 bp, Mus musculus
  siRNA target sequence for LOC211134 (NM_199364.1,147-165).
ctcaggccgtggaaagtca

SEQ ID NO: 816824 - DNA, 19 bp, Mus musculus
  siRNA target sequence for LOC211134 (NM_199364.1,151-169).
ggccgtggaaagtcaagtt

SEQ ID NO: 816825 - DNA, 19 bp, Mus musculus
  siRNA target sequence for LOC211134 (NM_199364.1,158-176).
gaaagtcaagttccaaaat

SEQ ID NO: 816826 - DNA, 19 bp, Mus musculus
  siRNA target sequence for LOC211134 (NM_199364.1,185-203).
gcgaagacttcttctacat

SEQ ID NO: 816827 - DNA, 19 bp, Mus musculus
  siRNA target sequence for LOC211134 (NM_199364.1,273-291).
gggtcagaccggagtagat

SEQ ID NO: 816828 - DNA, 19 bp, Mus musculus
  siRNA target sequence for LOC211134 (NM_199364.1,274-292).
ggtcagaccggagtagatt

SEQ ID NO: 816829 - DNA, 19 bp, Mus musculus
  siRNA target sequence for LOC211134 (NM_199364.1,275-293).
gtcagaccggagtagattt

SEQ ID NO: 816830 - DNA, 19 bp, Mus musculus
  siRNA target sequence for LOC211134 (NM_199364.1,279-297).
gaccggagtagattttgat

SEQ ID NO: 816831 - DNA, 19 bp, Mus musculus
  siRNA target sequence for LOC211134 (NM_199364.1,523-541).
ggccggaactccatgtcta

SEQ ID NO: 816832 - DNA, 19 bp, Mus musculus
  siRNA target sequence for LOC211134 (NM_199364.1,658-676).
caggacagtaatatgatga

SEQ ID NO: 816833 - DNA, 19 bp, Mus musculus
  siRNA target sequence for LOC211134 (NM_199364.1,837-855).
gctacagcgcagtttcgat

SEQ ID NO: 816834 - DNA, 19 bp, Mus musculus
  siRNA target sequence for LOC211134 (NM_199364.1,1198-1216).
caattagaggtgaacacta

SEQ ID NO: 816835 - DNA, 19 bp, Mus musculus
  siRNA target sequence for LOC211134 (NM_199364.1,1469-1487).
caggggttgggctcacttt

SEQ ID NO: 816836 - DNA, 19 bp, Mus musculus
  siRNA target sequence for LOC211134 (NM_199364.1,1471-1489).
ggggttgggctcactttct

SEQ ID NO: 816837 - DNA, 19 bp, Mus musculus
  siRNA target sequence for LOC211134 (NM_199364.1,1473-1491).
ggttgggctcactttctca

SEQ ID NO: 816838 - DNA, 19 bp, Mus musculus
  siRNA target sequence for LOC211134 (NM_199364.1,1593-1611).
gcggttggtgtggaaagaa

SEQ ID NO: 816839 - DNA, 19 bp, Mus musculus
  siRNA target sequence for LOC211134 (NM_199364.1,1767-1785).
cccctacgaggacatcata

SEQ ID NO: 816840 - DNA, 19 bp, Mus musculus
  siRNA target sequence for LOC381325 (NM_199365.1,34-52).
gagccctcacgggtttctt

SEQ ID NO: 816841 - DNA, 19 bp, Mus musculus
  siRNA target sequence for LOC381325 (NM_199365.1,685-703).
gcacgcccgtggcaaagtt

SEQ ID NO: 816842 - DNA, 19 bp, Mus musculus
  siRNA target sequence for LOC381325 (NM_199365.1,708-726).
cgcgacagcatctcagatt

SEQ ID NO: 816843 - DNA, 19 bp, Mus musculus
  siRNA target sequence for LOC381325 (NM_199365.1,747-765).
gcagatggtcactggttat

SEQ ID NO: 816844 - DNA, 19 bp, Mus musculus
  siRNA target sequence for LOC381325 (NM_199365.1,761-779).
gttattgcatggaaacctt

SEQ ID NO: 816845 - DNA, 19 bp, Mus musculus
  siRNA target sequence for LOC381334 (NM_199366.1,1017-1035).
gggtgggaaggccaatatt

SEQ ID NO: 816846 - DNA, 19 bp, Mus musculus
  siRNA target sequence for LOC381334 (NM_199366.1,1019-1037).
gtgggaaggccaatattct

SEQ ID NO: 816847 - DNA, 19 bp, Mus musculus
  siRNA target sequence for 1700017D11Rik (NM_199419.2,516-534).
ctggtctttgtgaatcctt

SEQ ID NO: 816848 - DNA, 19 bp, Mus musculus
  siRNA target sequence for LOC381493 (NM_199422.1,264-282).
cgcaggcagccatactaca

SEQ ID NO: 816849 - DNA, 19 bp, Mus musculus
  siRNA target sequence for LOC381493 (NM_199422.1,297-315).
cgggcagctgacaaaaaca

SEQ ID NO: 816850 - DNA, 19 bp, Mus musculus
  siRNA target sequence for LOC381493 (NM_199422.1,298-316).
gggcagctgacaaaaacaa

SEQ ID NO: 816851 - DNA, 19 bp, Mus musculus
  siRNA target sequence for Phkb (NM_199446.1,186-204).
ctcttcacctgctttgtta

SEQ ID NO: 816852 - DNA, 19 bp, Mus musculus
  siRNA target sequence for Phkb (NM_199446.1,206-224).
ggtctggctcagtttatga

SEQ ID NO: 816853 - DNA, 19 bp, Mus musculus
  siRNA target sequence for Phkb (NM_199446.1,217-235).
gtttatgaacctcttaaaa

SEQ ID NO: 816854 - DNA, 19 bp, Mus musculus
  siRNA target sequence for Phkb (NM_199446.1,247-265).
ccaagacctgataatgaaa

SEQ ID NO: 816855 - DNA, 19 bp, Mus musculus
  siRNA target sequence for Phkb (NM_199446.1,251-269).
gacctgataatgaaactct

SEQ ID NO: 816856 - DNA, 19 bp, Mus musculus
  siRNA target sequence for Phkb (NM_199446.1,253-271).
cctgataatgaaactctat

SEQ ID NO: 816857 - DNA, 19 bp, Mus musculus
  siRNA target sequence for Phkb (NM_199446.1,262-280).
gaaactctatgggataagt

SEQ ID NO: 816858 - DNA, 19 bp, Mus musculus
  siRNA target sequence for Phkb (NM_199446.1,272-290).
gggataagttggatcatta

SEQ ID NO: 816859 - DNA, 19 bp, Mus musculus
  siRNA target sequence for Phkb (NM_199446.1,279-297).
gttggatcattattacaga

SEQ ID NO: 816860 - DNA, 19 bp, Mus musculus
  siRNA target sequence for Phkb (NM_199446.1,308-326).
caacgatgctgatgtatca

SEQ ID NO: 816861 - DNA, 19 bp, Mus musculus
  siRNA target sequence for Phkb (NM_199446.1,312-330).
gatgctgatgtatcaaagt

SEQ ID NO: 816862 - DNA, 19 bp, Mus musculus
  siRNA target sequence for Phkb (NM_199446.1,338-356).
ccggtctctttcctactaa

SEQ ID NO: 816863 - DNA, 19 bp, Mus musculus
  siRNA target sequence for Phkb (NM_199446.1,339-357).
cggtctctttcctactaaa

SEQ ID NO: 816864 - DNA, 19 bp, Mus musculus
  siRNA target sequence for Phkb (NM_199446.1,345-363).
ctttcctactaaaacatgt

SEQ ID NO: 816865 - DNA, 19 bp, Mus musculus
  siRNA target sequence for Phkb (NM_199446.1,419-437).
gggccttggcgctagcata

SEQ ID NO: 816866 - DNA, 19 bp, Mus musculus
  siRNA target sequence for Phkb (NM_199446.1,434-452).
catacaggcgcattgatga

SEQ ID NO: 816867 - DNA, 19 bp, Mus musculus
  siRNA target sequence for Phkb (NM_199446.1,440-458).
ggcgcattgatgatgacaa

SEQ ID NO: 816868 - DNA, 19 bp, Mus musculus
  siRNA target sequence for Phkb (NM_199446.1,478-496).
gagcactcggccataaagt

SEQ ID NO: 816869 - DNA, 19 bp, Mus musculus
  siRNA target sequence for Phkb (NM_199446.1,480-498).
gcactcggccataaagtgt

SEQ ID NO: 816870 - DNA, 19 bp, Mus musculus
  siRNA target sequence for Phkb (NM_199446.1,481-499).
cactcggccataaagtgta

SEQ ID NO: 816871 - DNA, 19 bp, Mus musculus
  siRNA target sequence for Phkb (NM_199446.1,486-504).
ggccataaagtgtatgaga

SEQ ID NO: 816872 - DNA, 19 bp, Mus musculus
  siRNA target sequence for Phkb (NM_199446.1,533-551).
ctgataaggtccaacagtt

SEQ ID NO: 816873 - DNA, 19 bp, Mus musculus
  siRNA target sequence for Phkb (NM_199446.1,540-558).
ggtccaacagtttaaacaa

SEQ ID NO: 816874 - DNA, 19 bp, Mus musculus
  siRNA target sequence for Phkb (NM_199446.1,698-716).
caggcctccagataatcta

SEQ ID NO: 816875 - DNA, 19 bp, Mus musculus
  siRNA target sequence for Phkb (NM_199446.1,700-718).
ggcctccagataatctata

SEQ ID NO: 816876 - DNA, 19 bp, Mus musculus
  siRNA target sequence for Phkb (NM_199446.1,720-738).
cacggatgaggtttctttt

SEQ ID NO: 816877 - DNA, 19 bp, Mus musculus
  siRNA target sequence for Phkb (NM_199446.1,722-740).
cggatgaggtttcttttat

SEQ ID NO: 816878 - DNA, 19 bp, Mus musculus
  siRNA target sequence for Phkb (NM_199446.1,866-884).
cagccttagaagcaattaa

SEQ ID NO: 816879 - DNA, 19 bp, Mus musculus
  siRNA target sequence for Phkb (NM_199446.1,870-888).
cttagaagcaattaatgga

SEQ ID NO: 816880 - DNA, 19 bp, Mus musculus
  siRNA target sequence for Phkb (NM_199446.1,910-928).
gggtgttcctggtcagtta

SEQ ID NO: 816881 - DNA, 19 bp, Mus musculus
  siRNA target sequence for Phkb (NM_199446.1,912-930).
gtgttcctggtcagttata

SEQ ID NO: 816882 - DNA, 19 bp, Mus musculus
  siRNA target sequence for Phkb (NM_199446.1,914-932).
gttcctggtcagttatatt

SEQ ID NO: 816883 - DNA, 19 bp, Mus musculus
  siRNA target sequence for Phkb (NM_199446.1,955-973).
cgcaacaggcagacattgt

SEQ ID NO: 816884 - DNA, 19 bp, Mus musculus
  siRNA target sequence for Phkb (NM_199446.1,989-1007).
gagaatcacgctctcataa

SEQ ID NO: 816885 - DNA, 19 bp, Mus musculus
  siRNA target sequence for Phkb (NM_199446.1,991-1009).
gaatcacgctctcataaca

SEQ ID NO: 816886 - DNA, 19 bp, Mus musculus
  siRNA target sequence for Phkb (NM_199446.1,1046-1064).
cgtttgccttggatgatga

SEQ ID NO: 816887 - DNA, 19 bp, Mus musculus
  siRNA target sequence for Phkb (NM_199446.1,1047-1065).
gtttgccttggatgatgaa

SEQ ID NO: 816888 - DNA, 19 bp, Mus musculus
  siRNA target sequence for Phkb (NM_199446.1,1071-1089).
gttcagccagacacttgat

SEQ ID NO: 816889 - DNA, 19 bp, Mus musculus
  siRNA target sequence for Phkb (NM_199446.1,1078-1096).
cagacacttgataaagtga

SEQ ID NO: 816890 - DNA, 19 bp, Mus musculus
  siRNA target sequence for Phkb (NM_199446.1,1080-1098).
gacacttgataaagtgata

SEQ ID NO: 816891 - DNA, 19 bp, Mus musculus
  siRNA target sequence for Phkb (NM_199446.1,1146-1164).
gtacagaacgccattggaa

SEQ ID NO: 816892 - DNA, 19 bp, Mus musculus
  siRNA target sequence for Phkb (NM_199446.1,1168-1186).
cccaacagacgctattaca

SEQ ID NO: 816893 - DNA, 19 bp, Mus musculus
  siRNA target sequence for Phkb (NM_199446.1,1169-1187).
ccaacagacgctattacaa

SEQ ID NO: 816894 - DNA, 19 bp, Mus musculus
  siRNA target sequence for Phkb (NM_199446.1,1170-1188).
caacagacgctattacaaa

SEQ ID NO: 816895 - DNA, 19 bp, Mus musculus
  siRNA target sequence for Phkb (NM_199446.1,1193-1211).
cagagattaagctgtttga

SEQ ID NO: 816896 - DNA, 19 bp, Mus musculus
  siRNA target sequence for Phkb (NM_199446.1,1254-1272).
gatcgatggtgtttttaga

SEQ ID NO: 816897 - DNA, 19 bp, Mus musculus
  siRNA target sequence for Phkb (NM_199446.1,1274-1292).
gcaatcttgaacaagtcaa

SEQ ID NO: 816898 - DNA, 19 bp, Mus musculus
  siRNA target sequence for Phkb (NM_199446.1,1305-1323).
ccttttgacacctttgctt

SEQ ID NO: 816899 - DNA, 19 bp, Mus musculus
  siRNA target sequence for Phkb (NM_199446.1,1329-1347).
gaccacagaaggatatcct

SEQ ID NO: 816900 - DNA, 19 bp, Mus musculus
  siRNA target sequence for Phkb (NM_199446.1,1348-1366).
gttgtgccaaagtactatt

SEQ ID NO: 816901 - DNA, 19 bp, Mus musculus
  siRNA target sequence for Phkb (NM_199446.1,1439-1457).
gccgtgatgggaagttgtt

SEQ ID NO: 816902 - DNA, 19 bp, Mus musculus
  siRNA target sequence for Phkb (NM_199446.1,1440-1458).
ccgtgatgggaagttgttt

SEQ ID NO: 816903 - DNA, 19 bp, Mus musculus
  siRNA target sequence for Phkb (NM_199446.1,1442-1460).
gtgatgggaagttgtttct

SEQ ID NO: 816904 - DNA, 19 bp, Mus musculus
  siRNA target sequence for Phkb (NM_199446.1,1463-1481).
ggggacaagctctttatat

SEQ ID NO: 816905 - DNA, 19 bp, Mus musculus
  siRNA target sequence for Phkb (NM_199446.1,1495-1513).
ctagctgatgagttaatca

SEQ ID NO: 816906 - DNA, 19 bp, Mus musculus
  siRNA target sequence for Phkb (NM_199446.1,1542-1560).
ctttgtcccacttcagaat

SEQ ID NO: 816907 - DNA, 19 bp, Mus musculus
  siRNA target sequence for Phkb (NM_199446.1,1550-1568).
cacttcagaatcaacgtaa

SEQ ID NO: 816908 - DNA, 19 bp, Mus musculus
  siRNA target sequence for Phkb (NM_199446.1,1564-1582).
cgtaacgtgagcatgagat

SEQ ID NO: 816909 - DNA, 19 bp, Mus musculus
  siRNA target sequence for Phkb (NM_199446.1,1594-1612).
ggcccactggaaaatgact

SEQ ID NO: 816910 - DNA, 19 bp, Mus musculus
  siRNA target sequence for Phkb (NM_199446.1,1595-1613).
gcccactggaaaatgactt

SEQ ID NO: 816911 - DNA, 19 bp, Mus musculus
  siRNA target sequence for Phkb (NM_199446.1,1617-1635).
ggttcatgtagcacttgta

SEQ ID NO: 816912 - DNA, 19 bp, Mus musculus
  siRNA target sequence for Phkb (NM_199446.1,1654-1672).
caagtttttctcaatacat

SEQ ID NO: 816913 - DNA, 19 bp, Mus musculus
  siRNA target sequence for Phkb (NM_199446.1,1665-1683).
caatacatatggtattcaa

SEQ ID NO: 816914 - DNA, 19 bp, Mus musculus
  siRNA target sequence for Phkb (NM_199446.1,1699-1717).
caggtggaacccattcaga

SEQ ID NO: 816915 - DNA, 19 bp, Mus musculus
  siRNA target sequence for Phkb (NM_199446.1,1723-1741).
cctcagcaggagcttgtaa

SEQ ID NO: 816916 - DNA, 19 bp, Mus musculus
  siRNA target sequence for Phkb (NM_199446.1,1807-1825).
ggctgccttggtacatcaa

SEQ ID NO: 816917 - DNA, 19 bp, Mus musculus
  siRNA target sequence for Phkb (NM_199446.1,1813-1831).
cttggtacatcaaagattt

SEQ ID NO: 816918 - DNA, 19 bp, Mus musculus
  siRNA target sequence for Phkb (NM_199446.1,1905-1923).
cgttctgctgctcatagat

SEQ ID NO: 816919 - DNA, 19 bp, Mus musculus
  siRNA target sequence for Phkb (NM_199446.1,1937-1955).
cactacagttcattaagca

SEQ ID NO: 816920 - DNA, 19 bp, Mus musculus
  siRNA target sequence for Phkb (NM_199446.1,1939-1957).
ctacagttcattaagcaat

SEQ ID NO: 816921 - DNA, 19 bp, Mus musculus
  siRNA target sequence for Phkb (NM_199446.1,1968-1986).
gcatggacgcccacttttt

SEQ ID NO: 816922 - DNA, 19 bp, Mus musculus
  siRNA target sequence for Phkb (NM_199446.1,1973-1991).
gacgcccactttttcttgt

SEQ ID NO: 816923 - DNA, 19 bp, Mus musculus
  siRNA target sequence for Phkb (NM_199446.1,2022-2040).
cagattcaacccaatatta

SEQ ID NO: 816924 - DNA, 19 bp, Mus musculus
  siRNA target sequence for Phkb (NM_199446.1,2024-2042).
gattcaacccaatattaga

SEQ ID NO: 816925 - DNA, 19 bp, Mus musculus
  siRNA target sequence for Phkb (NM_199446.1,2043-2061).
catgctggcagcctttaaa

SEQ ID NO: 816926 - DNA, 19 bp, Mus musculus
  siRNA target sequence for Phkb (NM_199446.1,2078-2096).
gagtcaaagttcatgttga

SEQ ID NO: 816927 - DNA, 19 bp, Mus musculus
  siRNA target sequence for Phkb (NM_199446.1,2089-2107).
catgttgatcgtttacaga

SEQ ID NO: 816928 - DNA, 19 bp, Mus musculus
  siRNA target sequence for Phkb (NM_199446.1,2197-2215).
ctagaatttcctaagcatt

SEQ ID NO: 816929 - DNA, 19 bp, Mus musculus
  siRNA target sequence for Phkb (NM_199446.1,2279-2297).
ccattaccgagtggaaaaa

SEQ ID NO: 816930 - DNA, 19 bp, Mus musculus
  siRNA target sequence for Phkb (NM_199446.1,2365-2383).
ctgggtatactgctcaaaa

SEQ ID NO: 816931 - DNA, 19 bp, Mus musculus
  siRNA target sequence for Phkb (NM_199446.1,2367-2385).
gggtatactgctcaaaaga

SEQ ID NO: 816932 - DNA, 19 bp, Mus musculus
  siRNA target sequence for Phkb (NM_199446.1,2369-2387).
gtatactgctcaaaagaga

SEQ ID NO: 816933 - DNA, 19 bp, Mus musculus
  siRNA target sequence for Phkb (NM_199446.1,2384-2402).
gagagggccctaactttat

SEQ ID NO: 816934 - DNA, 19 bp, Mus musculus
  siRNA target sequence for Phkb (NM_199446.1,2388-2406).
gggccctaactttatcaca

SEQ ID NO: 816935 - DNA, 19 bp, Mus musculus
  siRNA target sequence for Phkb (NM_199446.1,2390-2408).
gccctaactttatcacaat

SEQ ID NO: 816936 - DNA, 19 bp, Mus musculus
  siRNA target sequence for Phkb (NM_199446.1,2428-2446).
cacattgagagagtgtata

SEQ ID NO: 816937 - DNA, 19 bp, Mus musculus
  siRNA target sequence for Phkb (NM_199446.1,2430-2448).
cattgagagagtgtataga

SEQ ID NO: 816938 - DNA, 19 bp, Mus musculus
  siRNA target sequence for Phkb (NM_199446.1,2523-2541).
ggccccatccattactaat

SEQ ID NO: 816939 - DNA, 19 bp, Mus musculus
  siRNA target sequence for Phkb (NM_199446.1,2531-2549).
ccattactaatgttttagt

SEQ ID NO: 816940 - DNA, 19 bp, Mus musculus
  siRNA target sequence for Phkb (NM_199446.1,2553-2571).
gggcaaacaggtaactcta

SEQ ID NO: 816941 - DNA, 19 bp, Mus musculus
  siRNA target sequence for Phkb (NM_199446.1,2611-2629).
ctgtctccaagagtgatta

SEQ ID NO: 816942 - DNA, 19 bp, Mus musculus
  siRNA target sequence for Phkb (NM_199446.1,2625-2643).
gattaagaacataatctat

SEQ ID NO: 816943 - DNA, 19 bp, Mus musculus
  siRNA target sequence for Phkb (NM_199446.1,2675-2693).
cagtcattcagcaagaact

SEQ ID NO: 816944 - DNA, 19 bp, Mus musculus
  siRNA target sequence for Phkb (NM_199446.1,2701-2719).
cacatcggctggatcatct

SEQ ID NO: 816945 - DNA, 19 bp, Mus musculus
  siRNA target sequence for Phkb (NM_199446.1,2739-2757).
cagcggcatgctgaaaata

SEQ ID NO: 816946 - DNA, 19 bp, Mus musculus
  siRNA target sequence for Phkb (NM_199446.1,2775-2793).
ccacgccatggagtatgaa

SEQ ID NO: 816947 - DNA, 19 bp, Mus musculus
  siRNA target sequence for Phkb (NM_199446.1,2907-2925).
gttgaatagacgtcagatt

SEQ ID NO: 816948 - DNA, 19 bp, Mus musculus
  siRNA target sequence for Phkb (NM_199446.1,2910-2928).
gaatagacgtcagattgat

SEQ ID NO: 816949 - DNA, 19 bp, Mus musculus
  siRNA target sequence for Phkb (NM_199446.1,2920-2938).
cagattgatgggtcattga

SEQ ID NO: 816950 - DNA, 19 bp, Mus musculus
  siRNA target sequence for Phkb (NM_199446.1,2922-2940).
gattgatgggtcattgaat

SEQ ID NO: 816951 - DNA, 19 bp, Mus musculus
  siRNA target sequence for Phkb (NM_199446.1,2926-2944).
gatgggtcattgaatagaa

SEQ ID NO: 816952 - DNA, 19 bp, Mus musculus
  siRNA target sequence for Phkb (NM_199446.1,2979-2997).
cctggaacgcacacctaat

SEQ ID NO: 816953 - DNA, 19 bp, Mus musculus
  siRNA target sequence for Phkb (NM_199446.1,2982-3000).
ggaacgcacacctaatggt

SEQ ID NO: 816954 - DNA, 19 bp, Mus musculus
  siRNA target sequence for Phkb (NM_199446.1,2983-3001).
gaacgcacacctaatggta

SEQ ID NO: 816955 - DNA, 19 bp, Mus musculus
  siRNA target sequence for Phkb (NM_199446.1,3025-3043).
ccacagcaaccaactttgt

SEQ ID NO: 816956 - DNA, 19 bp, Mus musculus
  siRNA target sequence for Phkb (NM_199446.1,3034-3052).
ccaactttgtcggatatga

SEQ ID NO: 816957 - DNA, 19 bp, Mus musculus
  siRNA target sequence for Phkb (NM_199446.1,3042-3060).
gtcggatatgaccatgtat

SEQ ID NO: 816958 - DNA, 19 bp, Mus musculus
  siRNA target sequence for Phkb (NM_199446.1,3044-3062).
cggatatgaccatgtatga

SEQ ID NO: 816959 - DNA, 19 bp, Mus musculus
  siRNA target sequence for Phkb (NM_199446.1,3046-3064).
gatatgaccatgtatgaga

SEQ ID NO: 816960 - DNA, 19 bp, Mus musculus
  siRNA target sequence for Phkb (NM_199446.1,3102-3120).
cattgaccagccaaagtat

SEQ ID NO: 816961 - DNA, 19 bp, Mus musculus
  siRNA target sequence for Phkb (NM_199446.1,3117-3135).
gtatagacagatcatagtt

SEQ ID NO: 816962 - DNA, 19 bp, Mus musculus
  siRNA target sequence for Phkb (NM_199446.1,3122-3140).
gacagatcatagttgagtt

SEQ ID NO: 816963 - DNA, 19 bp, Mus musculus
  siRNA target sequence for Phkb (NM_199446.1,3126-3144).
gatcatagttgagttacta

SEQ ID NO: 816964 - DNA, 19 bp, Mus musculus
  siRNA target sequence for Phkb (NM_199446.1,3155-3173).
ccattgtgctggaaagaaa

SEQ ID NO: 816965 - DNA, 19 bp, Mus musculus
  siRNA target sequence for Phkb (NM_199446.1,3216-3234).
ggttaaagaagcgtttcat

SEQ ID NO: 816966 - DNA, 19 bp, Mus musculus
  siRNA target sequence for Phkb (NM_199446.1,3226-3244).
gcgtttcatgagtttcaaa

SEQ ID NO: 816967 - DNA, 19 bp, Mus musculus
  siRNA target sequence for Phkb (NM_199446.1,3227-3245).
cgtttcatgagtttcaaaa

SEQ ID NO: 816968 - DNA, 19 bp, Mus musculus
  siRNA target sequence for Phkb (NM_199446.1,3254-3272).
gtcggctaaaagaaatcga

SEQ ID NO: 816969 - DNA, 19 bp, Mus musculus
  siRNA target sequence for Phkb (NM_199446.1,3256-3274).
cggctaaaagaaatcgaaa

SEQ ID NO: 816970 - DNA, 19 bp, Mus musculus
  siRNA target sequence for Phkb (NM_199446.1,3257-3275).
ggctaaaagaaatcgaaaa

SEQ ID NO: 816971 - DNA, 19 bp, Mus musculus
  siRNA target sequence for Phkb (NM_199446.1,3258-3276).
gctaaaagaaatcgaaaaa

SEQ ID NO: 816972 - DNA, 19 bp, Mus musculus
  siRNA target sequence for AA408556 (NM_199447.2,104-122).
ggtgtctcggccaagttga

SEQ ID NO: 816973 - DNA, 19 bp, Mus musculus
  siRNA target sequence for AA408556 (NM_199447.2,105-123).
gtgtctcggccaagttgaa

SEQ ID NO: 816974 - DNA, 19 bp, Mus musculus
  siRNA target sequence for AA408556 (NM_199447.2,220-238).
gagcgacctgactgttgat

SEQ ID NO: 816975 - DNA, 19 bp, Mus musculus
  siRNA target sequence for AA408556 (NM_199447.2,231-249).
ctgttgatgctgtgaagtt

SEQ ID NO: 816976 - DNA, 19 bp, Mus musculus
  siRNA target sequence for AA408556 (NM_199447.2,240-258).
ctgtgaagttgcataatga

SEQ ID NO: 816977 - DNA, 19 bp, Mus musculus
  siRNA target sequence for AA408556 (NM_199447.2,502-520).
gacggagaccgagtacttt

SEQ ID NO: 816978 - DNA, 19 bp, Mus musculus
  siRNA target sequence for AA408556 (NM_199447.2,564-582).
cactggctgccgttgcata

SEQ ID NO: 816979 - DNA, 19 bp, Mus musculus
  siRNA target sequence for AA408556 (NM_199447.2,568-586).
ggctgccgttgcataccta

SEQ ID NO: 816980 - DNA, 19 bp, Mus musculus
  siRNA target sequence for AA408556 (NM_199447.2,569-587).
gctgccgttgcatacctat

SEQ ID NO: 816981 - DNA, 19 bp, Mus musculus
  siRNA target sequence for AA408556 (NM_199447.2,570-588).
ctgccgttgcatacctatt

SEQ ID NO: 816982 - DNA, 19 bp, Mus musculus
  siRNA target sequence for AA408556 (NM_199447.2,572-590).
gccgttgcatacctattga

SEQ ID NO: 816983 - DNA, 19 bp, Mus musculus
  siRNA target sequence for AA408556 (NM_199447.2,573-591).
ccgttgcatacctattgaa

SEQ ID NO: 816984 - DNA, 19 bp, Mus musculus
  siRNA target sequence for AA408556 (NM_199447.2,612-630).
caagtcctgtgctcatgaa

SEQ ID NO: 816985 - DNA, 19 bp, Mus musculus
  siRNA target sequence for AA408556 (NM_199447.2,985-1003).
caccacgctgcatatgcta

SEQ ID NO: 816986 - DNA, 19 bp, Mus musculus
  siRNA target sequence for AA408556 (NM_199447.2,1113-1131).
ccatgcaggccttccataa

SEQ ID NO: 816987 - DNA, 19 bp, Mus musculus
  siRNA target sequence for AA408556 (NM_199447.2,1186-1204).
gatcgtcacggcactatat

SEQ ID NO: 816988 - DNA, 19 bp, Mus musculus
  siRNA target sequence for AA408556 (NM_199447.2,1190-1208).
gtcacggcactatatgact

SEQ ID NO: 816989 - DNA, 19 bp, Mus musculus
  siRNA target sequence for AA408556 (NM_199447.2,1207-1225).
ctacgttcccagtgagaat

SEQ ID NO: 816990 - DNA, 19 bp, Mus musculus
  siRNA target sequence for AA408556 (NM_199447.2,1210-1228).
cgttcccagtgagaatgat

SEQ ID NO: 816991 - DNA, 19 bp, Mus musculus
  siRNA target sequence for AA408556 (NM_199447.2,1215-1233).
ccagtgagaatgatttaca

SEQ ID NO: 816992 - DNA, 19 bp, Mus musculus
  siRNA target sequence for AA408556 (NM_199447.2,1310-1328).
ggccatcttgctcgatttt

SEQ ID NO: 816993 - DNA, 19 bp, Mus musculus
  siRNA target sequence for AA408556 (NM_199447.2,1311-1329).
gccatcttgctcgattttt

SEQ ID NO: 816994 - DNA, 19 bp, Mus musculus
  siRNA target sequence for AA408556 (NM_199447.2,1466-1484).
ggtcctccccagtacatca

SEQ ID NO: 816995 - DNA, 19 bp, Mus musculus
  siRNA target sequence for AA408556 (NM_199447.2,1473-1491).
cccagtacatcactaagat

SEQ ID NO: 816996 - DNA, 19 bp, Mus musculus
  siRNA target sequence for AA408556 (NM_199447.2,1475-1493).
cagtacatcactaagatgt

SEQ ID NO: 816997 - DNA, 19 bp, Mus musculus
  siRNA target sequence for AA408556 (NM_199447.2,1508-1526).
gagggcctcacatacaaat

SEQ ID NO: 816998 - DNA, 19 bp, Mus musculus
  siRNA target sequence for AA408556 (NM_199447.2,1510-1528).
gggcctcacatacaaattt

SEQ ID NO: 816999 - DNA, 19 bp, Mus musculus
  siRNA target sequence for AA408556 (NM_199447.2,1592-1610).
gcccatcctgtgatgaaga

SEQ ID NO: 817000 - DNA, 19 bp, Mus musculus
  siRNA target sequence for AA408556 (NM_199447.2,1729-1747).
cgtgcccttggaaatcgat

SEQ ID NO: 817001 - DNA, 19 bp, Mus musculus
  siRNA target sequence for AA408556 (NM_199447.2,1791-1809).
ctgtcatccgggatcatgt

SEQ ID NO: 817002 - DNA, 19 bp, Mus musculus
  siRNA target sequence for AA408556 (NM_199447.2,1851-1869).
ccttggccaccactcttaa

SEQ ID NO: 817003 - DNA, 19 bp, Mus musculus
  siRNA target sequence for AA408556 (NM_199447.2,1855-1873).
ggccaccactcttaagaga

SEQ ID NO: 817004 - DNA, 19 bp, Mus musculus
  siRNA target sequence for AA408556 (NM_199447.2,1903-1921).
cacagtggagtcgaagatt

SEQ ID NO: 817005 - DNA, 19 bp, Mus musculus
  siRNA target sequence for AA408556 (NM_199447.2,1905-1923).
cagtggagtcgaagattta

SEQ ID NO: 817006 - DNA, 19 bp, Mus musculus
  siRNA target sequence for AA408556 (NM_199447.2,1909-1927).
ggagtcgaagatttatgat

SEQ ID NO: 817007 - DNA, 19 bp, Mus musculus
  siRNA target sequence for AA408556 (NM_199447.2,1910-1928).
gagtcgaagatttatgata

SEQ ID NO: 817008 - DNA, 19 bp, Mus musculus
  siRNA target sequence for AA408556 (NM_199447.2,1912-1930).
gtcgaagatttatgataca

SEQ ID NO: 817009 - DNA, 19 bp, Mus musculus
  siRNA target sequence for AA408556 (NM_199447.2,1914-1932).
cgaagatttatgatacact

SEQ ID NO: 817010 - DNA, 19 bp, Mus musculus
  siRNA target sequence for AA408556 (NM_199447.2,2072-2090).
ctacgtaccctcatcacta

SEQ ID NO: 817011 - DNA, 19 bp, Mus musculus
  siRNA target sequence for AA408556 (NM_199447.2,2127-2145).
gccgctttgccaaaaactt

SEQ ID NO: 817012 - DNA, 19 bp, Mus musculus
  siRNA target sequence for AA408556 (NM_199447.2,2219-2237).
ctggaaaccatcaaaactt

SEQ ID NO: 817013 - DNA, 19 bp, Mus musculus
  siRNA target sequence for AA408556 (NM_199447.2,2252-2270).
gaggctcagttggtgaata

SEQ ID NO: 817014 - DNA, 19 bp, Mus musculus
  siRNA target sequence for AA408556 (NM_199447.2,2255-2273).
gctcagttggtgaatagct

SEQ ID NO: 817015 - DNA, 19 bp, Mus musculus
  siRNA target sequence for AA408556 (NM_199447.2,2256-2274).
ctcagttggtgaatagctt

SEQ ID NO: 817016 - DNA, 19 bp, Mus musculus
  siRNA target sequence for AA408556 (NM_199447.2,2381-2399).
gccatcagtaagctatact

SEQ ID NO: 817017 - DNA, 19 bp, Mus musculus
  siRNA target sequence for AA408556 (NM_199447.2,2383-2401).
catcagtaagctatactct

SEQ ID NO: 817018 - DNA, 19 bp, Mus musculus
  siRNA target sequence for AA408556 (NM_199447.2,2586-2604).
gtttgaagtgcctcataca

SEQ ID NO: 817019 - DNA, 19 bp, Mus musculus
  siRNA target sequence for AA408556 (NM_199447.2,2595-2613).
gcctcatacatattgtgaa

SEQ ID NO: 817020 - DNA, 19 bp, Mus musculus
  siRNA target sequence for AA408556 (NM_199447.2,2700-2718).
ggaagagtgcgtttacctt

SEQ ID NO: 817021 - DNA, 19 bp, Mus musculus
  siRNA target sequence for AA408556 (NM_199447.2,2781-2799).
ggtaccttgtcctcatcta

SEQ ID NO: 817022 - DNA, 19 bp, Mus musculus
  siRNA target sequence for AA408556 (NM_199447.2,2816-2834).
gcagttaccacagttagtt

SEQ ID NO: 817023 - DNA, 19 bp, Mus musculus
  siRNA target sequence for AA408556 (NM_199447.2,2853-2871).
cccacctcttgtttgagtt

SEQ ID NO: 817024 - DNA, 19 bp, Mus musculus
  siRNA target sequence for AA408556 (NM_199447.2,2961-2979).
ccgcgctaggcttcatcaa

SEQ ID NO: 817025 - DNA, 19 bp, Mus musculus
  siRNA target sequence for AA408556 (NM_199447.2,3004-3022).
ggtgcaccttgctaagcat

SEQ ID NO: 817026 - DNA, 19 bp, Mus musculus
  siRNA target sequence for AA408556 (NM_199447.2,3092-3110).
cggaacctgttcatcaagt

SEQ ID NO: 817027 - DNA, 19 bp, Mus musculus
  siRNA target sequence for AA408556 (NM_199447.2,3153-3171).
ccgcagaataccacaaagt

SEQ ID NO: 817028 - DNA, 19 bp, Mus musculus
  siRNA target sequence for AA408556 (NM_199447.2,3164-3182).
cacaaagtcctgataaaca

SEQ ID NO: 817029 - DNA, 19 bp, Mus musculus
  siRNA target sequence for AA408556 (NM_199447.2,3623-3641).
gatgccagtgtgagaagta

SEQ ID NO: 817030 - DNA, 19 bp, Mus musculus
  siRNA target sequence for AA408556 (NM_199447.2,3747-3765).
ctgcacctggagctgaata

SEQ ID NO: 817031 - DNA, 19 bp, Mus musculus
  siRNA target sequence for Fez2 (NM_199448.1,81-99).
caggaacaggagaactgta

SEQ ID NO: 817032 - DNA, 19 bp, Mus musculus
  siRNA target sequence for Fez2 (NM_199448.1,261-279).
caaggggacgagatttgga

SEQ ID NO: 817033 - DNA, 19 bp, Mus musculus
  siRNA target sequence for Fez2 (NM_199448.1,333-351).
catacaaggaccttgcatt

SEQ ID NO: 817034 - DNA, 19 bp, Mus musculus
  siRNA target sequence for Fez2 (NM_199448.1,429-447).
gagcagttggacatgcatt

SEQ ID NO: 817035 - DNA, 19 bp, Mus musculus
  siRNA target sequence for Fez2 (NM_199448.1,437-455).
ggacatgcattcgatcatt

SEQ ID NO: 817036 - DNA, 19 bp, Mus musculus
  siRNA target sequence for Fez2 (NM_199448.1,655-673).
cggtgtctgagctaaacga

SEQ ID NO: 817037 - DNA, 19 bp, Mus musculus
  siRNA target sequence for Fez2 (NM_199448.1,656-674).
ggtgtctgagctaaacgaa

SEQ ID NO: 817038 - DNA, 19 bp, Mus musculus
  siRNA target sequence for Fez2 (NM_199448.1,950-968).
gccgtccgtggaagatctt

SEQ ID NO: 817039 - DNA, 19 bp, Mus musculus
  siRNA target sequence for Fez2 (NM_199448.1,952-970).
cgtccgtggaagatcttca

SEQ ID NO: 817040 - DNA, 19 bp, Mus musculus
  siRNA target sequence for Fez2 (NM_199448.1,959-977).
ggaagatcttcagatacta

SEQ ID NO: 817041 - DNA, 19 bp, Mus musculus
  siRNA target sequence for Fez2 (NM_199448.1,1024-1042).
gcttgttaaccgactatat

SEQ ID NO: 817042 - DNA, 19 bp, Mus musculus
  siRNA target sequence for Fez2 (NM_199448.1,1025-1043).
cttgttaaccgactatata

SEQ ID NO: 817043 - DNA, 19 bp, Mus musculus
  siRNA target sequence for Fez2 (NM_199448.1,1033-1051).
ccgactatatactgaaagt

SEQ ID NO: 817044 - DNA, 19 bp, Mus musculus
  siRNA target sequence for Fez2 (NM_199448.1,1034-1052).
cgactatatactgaaagtt

SEQ ID NO: 817045 - DNA, 19 bp, Mus musculus
  siRNA target sequence for Zhx2 (NM_199449.1,668-686).
gaacattcgtccaaagaaa

SEQ ID NO: 817046 - DNA, 19 bp, Mus musculus
  siRNA target sequence for Zhx2 (NM_199449.1,734-752).
ctacagggcggttatgagt

SEQ ID NO: 817047 - DNA, 19 bp, Mus musculus
  siRNA target sequence for Zhx2 (NM_199449.1,740-758).
ggcggttatgagtgcaaat

SEQ ID NO: 817048 - DNA, 19 bp, Mus musculus
  siRNA target sequence for Zhx2 (NM_199449.1,743-761).
ggttatgagtgcaaatact

SEQ ID NO: 817049 - DNA, 19 bp, Mus musculus
  siRNA target sequence for Zhx2 (NM_199449.1,763-781).
cccttattccacgcaaaat

SEQ ID NO: 817050 - DNA, 19 bp, Mus musculus
  siRNA target sequence for Zhx2 (NM_199449.1,765-783).
cttattccacgcaaaatct

SEQ ID NO: 817051 - DNA, 19 bp, Mus musculus
  siRNA target sequence for Zhx2 (NM_199449.1,774-792).
cgcaaaatctgaatgagtt

SEQ ID NO: 817052 - DNA, 19 bp, Mus musculus
  siRNA target sequence for Zhx2 (NM_199449.1,830-848).
ctcaaccccctctacgtat

SEQ ID NO: 817053 - DNA, 19 bp, Mus musculus
  siRNA target sequence for Zhx2 (NM_199449.1,845-863).
gtatgtgccgaatgtaact

SEQ ID NO: 817054 - DNA, 19 bp, Mus musculus
  siRNA target sequence for Zhx2 (NM_199449.1,851-869).
gccgaatgtaacttcacaa

SEQ ID NO: 817055 - DNA, 19 bp, Mus musculus
  siRNA target sequence for Zhx2 (NM_199449.1,858-876).
gtaacttcacaaccaaaaa

SEQ ID NO: 817056 - DNA, 19 bp, Mus musculus
  siRNA target sequence for Zhx2 (NM_199449.1,1015-1033).
cagtggtcctggaagtagt

SEQ ID NO: 817057 - DNA, 19 bp, Mus musculus
  siRNA target sequence for Zhx2 (NM_199449.1,1019-1037).
ggtcctggaagtagtgata

SEQ ID NO: 817058 - DNA, 19 bp, Mus musculus
  siRNA target sequence for Zhx2 (NM_199449.1,1044-1062).
ctggggtctcggtaggaaa

SEQ ID NO: 817059 - DNA, 19 bp, Mus musculus
  siRNA target sequence for Zhx2 (NM_199449.1,1046-1064).
ggggtctcggtaggaaaaa

SEQ ID NO: 817060 - DNA, 19 bp, Mus musculus
  siRNA target sequence for Zhx2 (NM_199449.1,1249-1267).
cgtacagctgccaccaaat

SEQ ID NO: 817061 - DNA, 19 bp, Mus musculus
  siRNA target sequence for Zhx2 (NM_199449.1,1253-1271).
cagctgccaccaaatatca

SEQ ID NO: 817062 - DNA, 19 bp, Mus musculus
  siRNA target sequence for Zhx2 (NM_199449.1,1288-1306).
ccccgtcccgctgaatact

SEQ ID NO: 817063 - DNA, 19 bp, Mus musculus
  siRNA target sequence for Zhx2 (NM_199449.1,1289-1307).
cccgtcccgctgaatacta

SEQ ID NO: 817064 - DNA, 19 bp, Mus musculus
  siRNA target sequence for Zhx2 (NM_199449.1,1332-1350).
caaatgctaccatgatcaa

SEQ ID NO: 817065 - DNA, 19 bp, Mus musculus
  siRNA target sequence for Zhx2 (NM_199449.1,1446-1464).
ccacccagcgtttaaagca

SEQ ID NO: 817066 - DNA, 19 bp, Mus musculus
  siRNA target sequence for Zhx2 (NM_199449.1,1949-1967).
gcgaggagtgagatcaaga

SEQ ID NO: 817067 - DNA, 19 bp, Mus musculus
  siRNA target sequence for Zhx2 (NM_199449.1,1950-1968).
cgaggagtgagatcaagaa

SEQ ID NO: 817068 - DNA, 19 bp, Mus musculus
  siRNA target sequence for Zhx2 (NM_199449.1,2080-2098).
ccatgtatacccagacttt

SEQ ID NO: 817069 - DNA, 19 bp, Mus musculus
  siRNA target sequence for Zhx2 (NM_199449.1,2343-2361).
ctctatcccgacttgatca

SEQ ID NO: 817070 - DNA, 19 bp, Mus musculus
  siRNA target sequence for Zhx2 (NM_199449.1,2406-2424).
cagcaattgtacaaaatca

SEQ ID NO: 817071 - DNA, 19 bp, Mus musculus
  siRNA target sequence for Zhx2 (NM_199449.1,2478-2496).
ctcaggagtacgatcagtt

SEQ ID NO: 817072 - DNA, 19 bp, Mus musculus
  siRNA target sequence for Zhx2 (NM_199449.1,2512-2530).
cctggtccgaactgagatt

SEQ ID NO: 817073 - DNA, 19 bp, Mus musculus
  siRNA target sequence for Zhx2 (NM_199449.1,2624-2642).
ggtcgtgatgccgtatcaa

SEQ ID NO: 817074 - DNA, 19 bp, Mus musculus
  siRNA target sequence for Zhx2 (NM_199449.1,2627-2645).
cgtgatgccgtatcaagaa

SEQ ID NO: 817075 - DNA, 19 bp, Mus musculus
  siRNA target sequence for Zhx2 (NM_199449.1,2628-2646).
gtgatgccgtatcaagaaa

SEQ ID NO: 817076 - DNA, 19 bp, Mus musculus
  siRNA target sequence for Zhx2 (NM_199449.1,2643-2661).
gaaaggtggcaaaacaagt

SEQ ID NO: 817077 - DNA, 19 bp, Mus musculus
  siRNA target sequence for Zhx2 (NM_199449.1,2685-2703).
gcgaggcggcacatcagta

SEQ ID NO: 817078 - DNA, 19 bp, Mus musculus
  siRNA target sequence for 1700055M20Rik (NM_199455.1,321-339).
cccttcggcgcatggatat

SEQ ID NO: 817079 - DNA, 19 bp, Mus musculus
  siRNA target sequence for 1700055M20Rik (NM_199455.1,430-448).
cctaggggtccccaacaaa

SEQ ID NO: 817080 - DNA, 19 bp, Mus musculus
  siRNA target sequence for 1700055M20Rik (NM_199455.1,450-468).
ccctgcaatgcctggattt

SEQ ID NO: 817081 - DNA, 19 bp, Mus musculus
  siRNA target sequence for 1700055M20Rik (NM_199455.1,452-470).
ctgcaatgcctggatttca

SEQ ID NO: 817082 - DNA, 23 bp, Artificial Sequence
  siRNA target sequence for Firefly Luciferase
gccattctatccgctggaagatg

SEQ ID NO: 817083 - DNA, 23 bp, Artificial Sequence
  homologous sequence
gccattctatccgcgggcggatg

SEQ ID NO: 817084 - DNA, 23 bp, Artificial Sequence
  homologous sequence
gccattctatccgccgggggatg

SEQ ID NO: 817085 - DNA, 23 bp, Artificial Sequence
  homologous sequence
gccattctatccgcgggacgatg

SEQ ID NO: 817086 - DNA, 23 bp, Artificial Sequence
  homologous sequence
gccattctatccgctggcggatg

SEQ ID NO: 817087 - DNA, 23 bp, Artificial Sequence
  homologous sequence
gccattctatccgctggaggatg

SEQ ID NO: 817088 - DNA, 23 bp, Artificial Sequence
  homologous sequence
gccattctatccgctgtaatatg

SEQ ID NO: 817089 - DNA, 23 bp, Artificial Sequence
  homologous sequence
gccattctatccgctaaaagatg

SEQ ID NO: 817090 - DNA, 23 bp, Artificial Sequence
  homologous sequence
gccattctatccgctataaaatg

SEQ ID NO: 817091 - DNA, 23 bp, Artificial Sequence
  homologous sequence
gccggcccgtccgctggaagatg

SEQ ID NO: 817092 - DNA, 23 bp, Artificial Sequence
  homologous sequence
gcccgtccgtccgctggaagatg

SEQ ID NO: 817093 - DNA, 23 bp, Artificial Sequence
  homologous sequence
gccgtcctgtccgctggaagatg

SEQ ID NO: 817094 - DNA, 23 bp, Artificial Sequence
  homologous sequence
gccacccgatccgctggaagatg

SEQ ID NO: 817095 - DNA, 23 bp, Artificial Sequence
  homologous sequence
gccattatatccgctggaagatg

SEQ ID NO: 817096 - DNA, 23 bp, Artificial Sequence
  homologous sequence
gcaattctatccgctggaagatg

SEQ ID NO: 817097 - DNA, 23 bp, Artificial Sequence
  homologous sequence
gcgattctatccgctggaagatg

SEQ ID NO: 817098 - DNA, 23 bp, Artificial Sequence
  homologous sequence
gctattctatccgctggaagatg

SEQ ID NO: 817099 - DNA, 23 bp, Artificial Sequence
  homologous sequence
gccattctatccgctggaaggtg

SEQ ID NO: 817100 - DNA, 23 bp, Artificial Sequence
  homologous sequence
gccattctatccgctggaagctg

SEQ ID NO: 817101 - DNA, 23 bp, Artificial Sequence
  homologous sequence
gccattctatccgctggaagttg

SEQ ID NO: 817102 - RNA, 21 nt, Artificial Sequence
  siRNA sense strand as evaluation subject
gucguggcuaccauuaaguca

SEQ ID NO: 817103 - RNA, 21 nt, Artificial Sequence
  siRNA antisense strand as evaluation subject
acuuaaugguagccacgacca

SEQ ID NO: 817104 - RNA, 21 nt, Artificial Sequence
  siRNA sense strand as evaluation subject
ggccgagguccuauacguugc

SEQ ID NO: 817105 - RNA, 21 nt, Artificial Sequence
  siRNA antisense strand as evaluation subject
aacguauaggaccucggccag

SEQ ID NO: 817106 - RNA, 21 nt, Artificial Sequence
  siRNA sense strand as evaluation subject
cucaucgagggucauacuauu

SEQ ID NO: 817107 - RNA, 21 nt, Artificial Sequence
  siRNA antisense strand as evaluation subject
uaguaugacccucgaugagga

SEQ ID NO: 817108 - RNA, 21 nt, Artificial Sequence
  siRNA sense strand as evaluation subject
cugggcgaugacaaccuaugc

SEQ ID NO: 817109 - RNA, 21 nt, Artificial Sequence
  siRNA antisense strand as evaluation subject
auagguugucaucgcccagac

SEQ ID NO: 817110 - RNA, 21 nt, Artificial Sequence
  siRNA sense strand as evaluation subject
cgaucgaguggccauuaaagc

SEQ ID NO: 817111 - RNA, 21 nt, Artificial Sequence
  siRNA antisense strand as evaluation subject
uuuaauggccacucgaucggc

SEQ ID NO: 817112 - RNA, 21 nt, Artificial Sequence
  siRNA sense strand as evaluation subject
gcuacacaauccguaauguug

SEQ ID NO: 817113 - RNA, 21 nt, Artificial Sequence
  siRNA antisense strand as evaluation subject
acauuacggauuguguagcca

SEQ ID NO: 817114 - RNA, 21 nt, Artificial Sequence
  siRNA sense strand as evaluation subject
cuagccgaggaagaacuauga

SEQ ID NO: 817115 - RNA, 21 nt, Artificial Sequence
  siRNA antisense strand as evaluation subject
auaguucuuccucggcuaguu

SEQ ID NO: 817116 - RNA, 21 nt, Artificial Sequence
  siRNA sense strand as evaluation subject
gcacuucgccaaaauucgaga

SEQ ID NO: 817117 - RNA, 21 nt, Artificial Sequence
  siRNA antisense strand as evaluation subject
ucgaauuuuggcgaagugcuu

SEQ ID NO: 817118 - RNA, 21 nt, Artificial Sequence
  siRNA sense strand as evaluation subject
gggucagcucguuacucaacu

SEQ ID NO: 817119 - RNA, 21 nt, Artificial Sequence
  siRNA antisense strand as evaluation subject
uugaguaacgagcugacccca

SEQ ID NO: 817120 - RNA, 21 nt, Artificial Sequence
  siRNA sense strand as evaluation subject
gagucccuguucguacuuaca

SEQ ID NO: 817121 - RNA, 21 nt, Artificial Sequence
  siRNA antisense strand as evaluation subject
uaaguacgaacagggacucca

SEQ ID NO: 817122 - RNA, 21 nt, Artificial Sequence
  siRNA sense strand as evaluation subject
gagccccaauagagcuuauac

SEQ ID NO: 817123 - RNA, 21 nt, Artificial Sequence
  siRNA antisense strand as evaluation subject
auaagcucuauuggggcuccc

SEQ ID NO: 817124 - RNA, 21 nt, Artificial Sequence
  siRNA sense strand as evaluation subject
ccagaaagcggcuuaucgaac

SEQ ID NO: 817125 - RNA, 21 nt, Artificial Sequence
  siRNA antisense strand as evaluation subject
ucgauaagccgcuuucuggac

SEQ ID NO: 817126 - RNA, 21 nt, Artificial Sequence
  siRNA sense strand as evaluation subject
cgggagaccacgauuauaucu

SEQ ID NO: 817127 - RNA, 21 nt, Artificial Sequence
  siRNA antisense strand as evaluation subject
auauaaucguggucucccggg

SEQ ID NO: 817128 - RNA, 21 nt, Artificial Sequence
  siRNA sense strand as evaluation subject
cgguggccuggauaacauuug

SEQ ID NO: 817129 - RNA, 21 nt, Artificial Sequence
  siRNA antisense strand as evaluation subject
aauguuauccaggccaccgca

SEQ ID NO: 817130 - RNA, 21 nt, Artificial Sequence
  siRNA sense strand as evaluation subject
guauaaaggugacauauaugg

SEQ ID NO: 817131 - RNA, 21 nt, Artificial Sequence
  siRNA antisense strand as evaluation subject
auauaugucaccuuuauaccu

SEQ ID NO: 817132 - RNA, 21 nt, Artificial Sequence
  siRNA sense strand as evaluation subject
cucuucagacccgaauuguga

SEQ ID NO: 817133 - RNA, 21 nt, Artificial Sequence
  siRNA antisense strand as evaluation subject
acaauucgggucugaagagaa

SEQ ID NO: 817134 - RNA, 21 nt, Artificial Sequence
  siRNA sense strand as evaluation subject
gagguaccuacaauuuugauc

SEQ ID NO: 817135 - RNA, 21 nt, Artificial Sequence
  siRNA antisense strand as evaluation subject
ucaaaauuguagguaccuccu

SEQ ID NO: 817136 - RNA, 21 nt, Artificial Sequence
  siRNA sense strand as evaluation subject
guacucgauggacuaaguaau

SEQ ID NO: 817137 - RNA, 21 nt, Artificial Sequence
  siRNA antisense strand as evaluation subject
uacuuaguccaucgaguacua

SEQ ID NO: 817138 - RNA, 21 nt, Artificial Sequence
  siRNA sense strand as evaluation subject
ggguucccuagauauaacagg

SEQ ID NO: 817139 - RNA, 21 nt, Artificial Sequence
  siRNA antisense strand as evaluation subject
uguuauaucuagggaacccac

SEQ ID NO: 817140 - RNA, 21 nt, Artificial Sequence
  siRNA sense strand as evaluation subject
gguucggacgucagaugaucg

SEQ ID NO: 817141 - RNA, 21 nt, Artificial Sequence
  siRNA antisense strand as evaluation subject
aucaucugacguccgaacccc

SEQ ID NO: 817142 - RNA, 21 nt, Artificial Sequence
  siRNA sense strand as evaluation subject
gcucccugauggacgauuacu

SEQ ID NO: 817143 - RNA, 21 nt, Artificial Sequence
  siRNA antisense strand as evaluation subject
uaaucguccaucagggagcca

SEQ ID NO: 817144 - RNA, 21 nt, Artificial Sequence
  siRNA sense strand as evaluation subject
cgacagauuggauugcuauuu

SEQ ID NO: 817145 - RNA, 21 nt, Artificial Sequence
  siRNA antisense strand as evaluation subject
auagcaauccaaucugucgug

SEQ ID NO: 817146 - RNA, 21 nt, Artificial Sequence
  siRNA sense strand as evaluation subject
gcgauaugaacguucacaagc

SEQ ID NO: 817147 - RNA, 21 nt, Artificial Sequence
  siRNA antisense strand as evaluation subject
uugugaacguucauaucgcag

SEQ ID NO: 817148 - RNA, 21 nt, Artificial Sequence
  siRNA sense strand as evaluation subject
guucgaguagcuaucaagaaa

SEQ ID NO: 817149 - RNA, 21 nt, Artificial Sequence
  siRNA antisense strand as evaluation subject
ucuugauagcuacucgaacuu

SEQ ID NO: 817150 - RNA, 21 nt, Artificial Sequence
  siRNA sense strand as evaluation subject
cgugaacuuguccucuuaaaa

SEQ ID NO: 817151 - RNA, 21 nt, Artificial Sequence
  siRNA antisense strand as evaluation subject
uuaagaggacaaguucacgau

SEQ ID NO: 817152 - RNA, 21 nt, Artificial Sequence
  siRNA sense strand as evaluation subject
ccgacggcucugcaguuaacg

SEQ ID NO: 817153 - RNA, 21 nt, Artificial Sequence
  siRNA antisense strand as evaluation subject
uuaacugcagagccgucgggg

SEQ ID NO: 817154 - RNA, 21 nt, Artificial Sequence
  siRNA sense strand as evaluation subject
cagcccgucugguaaacuugu

SEQ ID NO: 817155 - RNA, 21 nt, Artificial Sequence
  siRNA antisense strand as evaluation subject
aaguuuaccagacgggcugaa

SEQ ID NO: 817156 - RNA, 21 nt, Artificial Sequence
  siRNA sense strand as evaluation subject
gaccugccgugauaucguuaa

SEQ ID NO: 817157 - RNA, 21 nt, Artificial Sequence
  siRNA antisense strand as evaluation subject
aacgauaucacggcaggucau

SEQ ID NO: 817158 - RNA, 21 nt, Artificial Sequence
  siRNA sense strand as evaluation subject
cgcuuauaccaaguugaauau

SEQ ID NO: 817159 - RNA, 21 nt, Artificial Sequence
  siRNA antisense strand as evaluation subject
auucaacuugguauaagcgac

SEQ ID NO: 817160 - RNA, 21 nt, Artificial Sequence
  siRNA sense strand as evaluation subject
cgacaggggcgugaauacuuu

SEQ ID NO: 817161 - RNA, 21 nt, Artificial Sequence
  siRNA antisense strand as evaluation subject
aguauucacgccccugucgua

SEQ ID NO: 817162 - RNA, 21 nt, Artificial Sequence
  siRNA sense strand as evaluation subject
gguuuugaccgccacauuacc

SEQ ID NO: 817163 - RNA, 21 nt, Artificial Sequence
  siRNA antisense strand as evaluation subject
uaauguggcggucaaaaccgg

SEQ ID NO: 817164 - RNA, 21 nt, Artificial Sequence
  siRNA sense strand as evaluation subject
ccgaugcaaggauagucauca

SEQ ID NO: 817165 - RNA, 21 nt, Artificial Sequence
  siRNA antisense strand as evaluation subject
augacuauccuugcaucggcg

SEQ ID NO: 817166 - RNA, 21 nt, Artificial Sequence
  siRNA sense strand as evaluation subject
cgauuuucgcccuacguuuuc

SEQ ID NO: 817167 - RNA, 21 nt, Artificial Sequence
  siRNA antisense strand as evaluation subject
aaacguagggcgaaaaucgca

SEQ ID NO: 817168 - RNA, 21 nt, Artificial Sequence
  siRNA sense strand as evaluation subject
guauccucgaccgauacuaca

SEQ ID NO: 817169 - RNA, 21 nt, Artificial Sequence
  siRNA antisense strand as evaluation subject
uaguaucggucgaggauacug

SEQ ID NO: 817170 - RNA, 21 nt, Artificial Sequence
  siRNA sense strand as evaluation subject
gucggcagaucaaaccuuaua

SEQ ID NO: 817171 - RNA, 21 nt, Artificial Sequence
  siRNA antisense strand as evaluation subject
uaagguuugaucugccgaccu

SEQ ID NO: 817172 - RNA, 21 nt, Artificial Sequence
  siRNA sense strand as evaluation subject
cuggcgacuacgcugauuucc

SEQ ID NO: 817173 - RNA, 21 nt, Artificial Sequence
  siRNA antisense strand as evaluation subject
aaaucagcguagucgccagag

SEQ ID NO: 817174 - RNA, 21 nt, Artificial Sequence
  siRNA sense strand as evaluation subject
guagagcggcaaguacuuuug

SEQ ID NO: 817175 - RNA, 21 nt, Artificial Sequence
  siRNA antisense strand as evaluation subject
aaaguacuugccgcucuaccc

SEQ ID NO: 817176 - RNA, 21 nt, Artificial Sequence
  siRNA sense strand as evaluation subject
gccuugaccgcaagauagagu

SEQ ID NO: 817177 - RNA, 21 nt, Artificial Sequence
  siRNA antisense strand as evaluation subject
ucuaucuugcggucaaggcgg

SEQ ID NO: 817178 - RNA, 21 nt, Artificial Sequence
  siRNA sense strand as evaluation subject
guccuaauuccguauugguca

SEQ ID NO: 817179 - RNA, 21 nt, Artificial Sequence
  siRNA antisense strand as evaluation subject
accaauacggaauuaggacag

SEQ ID NO: 817180 - RNA, 21 nt, Artificial Sequence
  siRNA sense strand as evaluation subject
cgacauccacaccuaaugucc

SEQ ID NO: 817181 - RNA, 21 nt, Artificial Sequence
  siRNA antisense strand as evaluation subject
acauuagguguggaugucgac

SEQ ID NO: 817182 - RNA, 21 nt, Artificial Sequence
  siRNA sense strand as evaluation subject
cgaguaugucgccuauguugc

SEQ ID NO: 817183 - RNA, 21 nt, Artificial Sequence
  siRNA antisense strand as evaluation subject
aacauaggcgacauacucggc

SEQ ID NO: 817184 - RNA, 21 nt, Artificial Sequence
  siRNA sense strand as evaluation subject
cugcgcgagaugauacuuuga

SEQ ID NO: 817185 - RNA, 21 nt, Artificial Sequence
  siRNA antisense strand as evaluation subject
aaaguaucaucucgcgcagcu

SEQ ID NO: 817186 - RNA, 21 nt, Artificial Sequence
  siRNA sense strand as evaluation subject
cgucuacuccgccuucaaucu

SEQ ID NO: 817187 - RNA, 21 nt, Artificial Sequence
  siRNA antisense strand as evaluation subject
auugaaggcggaguagacggu

SEQ ID NO: 817188 - RNA, 21 nt, Artificial Sequence
  siRNA sense strand as evaluation subject
cugugcauugccuaugucuuu

SEQ ID NO: 817189 - RNA, 21 nt, Artificial Sequence
  siRNA antisense strand as evaluation subject
agacauaggcaaugcacagca

SEQ ID NO: 817190 - RNA, 21 nt, Artificial Sequence
  siRNA sense strand as evaluation subject
cacuaccuuaggucuagaagu

SEQ ID NO: 817191 - RNA, 21 nt, Artificial Sequence
  siRNA antisense strand as evaluation subject
uucuagaccuaagguagugag

SEQ ID NO: 817192 - RNA, 21 nt, Artificial Sequence
  siRNA sense strand as evaluation subject
gccuacacacccaauucgucu

SEQ ID NO: 817193 - RNA, 21 nt, Artificial Sequence
  siRNA antisense strand as evaluation subject
acgaauuggguguguaggcug

SEQ ID NO: 817194 - RNA, 21 nt, Artificial Sequence
  siRNA sense strand as evaluation subject
cacuaaacgaggauuccuaua

SEQ ID NO: 817195 - RNA, 21 nt, Artificial Sequence
  siRNA antisense strand as evaluation subject
uaggaauccucguuuagugug

SEQ ID NO: 817196 - RNA, 21 nt, Artificial Sequence
  siRNA sense strand as evaluation subject
ggcagaagcuuauucgaauuu

SEQ ID NO: 817197 - RNA, 21 nt, Artificial Sequence
  siRNA antisense strand as evaluation subject
auucgaauaagcuucugccag

SEQ ID NO: 817198 - RNA, 21 nt, Artificial Sequence
  siRNA sense strand as evaluation subject
gugcacccaauuacuguuauc

SEQ ID NO: 817199 - RNA, 21 nt, Artificial Sequence
  siRNA antisense strand as evaluation subject
uaacaguaauugggugcacug

SEQ ID NO: 817200 - RNA, 21 nt, Artificial Sequence
  siRNA sense strand as evaluation subject
gcacgcuaauucuaugguuuc

SEQ ID NO: 817201 - RNA, 21 nt, Artificial Sequence
  siRNA antisense strand as evaluation subject
aaccauagaauuagcgugcag

SEQ ID NO: 817202 - RNA, 21 nt, Artificial Sequence
  siRNA sense strand as evaluation subject
gguuagguugcuucaaucuaa

SEQ ID NO: 817203 - RNA, 21 nt, Artificial Sequence
  siRNA antisense strand as evaluation subject
agauugaagcaaccuaaccga

SEQ ID NO: 817204 - RNA, 21 nt, Artificial Sequence
  siRNA sense strand as evaluation subject
gaagggccauacuaugugaaa

SEQ ID NO: 817205 - RNA, 21 nt, Artificial Sequence
  siRNA antisense strand as evaluation subject
ucacauaguauggcccuucac

SEQ ID NO: 817206 - RNA, 21 nt, Artificial Sequence
  siRNA sense strand as evaluation subject
cacagcgacgaguacaagauc

SEQ ID NO: 817207 - RNA, 21 nt, Artificial Sequence
  siRNA antisense strand as evaluation subject
ucuuguacucgucgcugugcu

SEQ ID NO: 817208 - RNA, 21 nt, Artificial Sequence
  siRNA sense strand as evaluation subject
cgucgcuaucaaggaauuaag

SEQ ID NO: 817209 - RNA, 21 nt, Artificial Sequence
  siRNA antisense strand as evaluation subject
uaauuccuugauagcgacggg

SEQ ID NO: 817210 - RNA, 21 nt, Artificial Sequence
  siRNA sense strand as evaluation subject
ccuugcgguacuacuaugaca

SEQ ID NO: 817211 - RNA, 21 nt, Artificial Sequence
  siRNA antisense strand as evaluation subject
ucauaguaguaccgcaaggcc

SEQ ID NO: 817212 - RNA, 21 nt, Artificial Sequence
  siRNA sense strand as evaluation subject
cuacacagccgacuaguuaug

SEQ ID NO: 817213 - RNA, 21 nt, Artificial Sequence
  siRNA antisense strand as evaluation subject
uaacuagucggcuguguagag

SEQ ID NO: 817214 - RNA, 21 nt, Artificial Sequence
  siRNA sense strand as evaluation subject
gcaccgucccugacuauaacc

SEQ ID NO: 817215 - RNA, 21 nt, Artificial Sequence
  siRNA antisense strand as evaluation subject
uuauagucagggacggugccc

SEQ ID NO: 817216 - RNA, 21 nt, Artificial Sequence
  siRNA sense strand as evaluation subject
cgcgccuggaagagaaaguga

SEQ ID NO: 817217 - RNA, 21 nt, Artificial Sequence
  siRNA antisense strand as evaluation subject
acuuucucuuccaggcgcgag

SEQ ID NO: 817218 - RNA, 21 nt, Artificial Sequence
  siRNA sense strand as evaluation subject
gcgacuagagguuaaacuagg

SEQ ID NO: 817219 - RNA, 21 nt, Artificial Sequence
  siRNA antisense strand as evaluation subject
uaguuuaaccucuagucgcaa

SEQ ID NO: 817220 - RNA, 21 nt, Artificial Sequence
  siRNA sense strand as evaluation subject
gacuacgccuugaagcuaaag

SEQ ID NO: 817221 - RNA, 21 nt, Artificial Sequence
  siRNA antisense strand as evaluation subject
uuagcuucaaggcguagucaa

SEQ ID NO: 817222 - RNA, 21 nt, Artificial Sequence
  siRNA sense strand as evaluation subject
ggaaccacggaauuacucugc

SEQ ID NO: 817223 - RNA, 21 nt, Artificial Sequence
  siRNA antisense strand as evaluation subject
agaguaauuccgugguuccag

SEQ ID NO: 817224 - RNA, 21 nt, Artificial Sequence
  siRNA sense strand as evaluation subject
cucgcauuggagaacguuaca

SEQ ID NO: 817225 - RNA, 21 nt, Artificial Sequence
  siRNA antisense strand as evaluation subject
uaacguucuccaaugcgaguu

SEQ ID NO: 817226 - RNA, 21 nt, Artificial Sequence
  siRNA sense strand as evaluation subject
gguacaugaaguauaugcugu

SEQ ID NO: 817227 - RNA, 21 nt, Artificial Sequence
  siRNA antisense strand as evaluation subject
agcauauacuucauguaccuc

SEQ ID NO: 817228 - RNA, 21 nt, Artificial Sequence
  siRNA sense strand as evaluation subject
cucagacccacgcauaauucg

SEQ ID NO: 817229 - RNA, 21 nt, Artificial Sequence
  siRNA antisense strand as evaluation subject
aauuaugcgugggucugaggc

SEQ ID NO: 817230 - RNA, 21 nt, Artificial Sequence
  siRNA sense strand as evaluation subject
gcaaucgggugguaucauagc

SEQ ID NO: 817231 - RNA, 21 nt, Artificial Sequence
  siRNA antisense strand as evaluation subject
uaugauaccacccgauugcau

SEQ ID NO: 817232 - RNA, 21 nt, Artificial Sequence
  siRNA sense strand as evaluation subject
ggggccaucacauucacaugg

SEQ ID NO: 817233 - RNA, 21 nt, Artificial Sequence
  siRNA antisense strand as evaluation subject
augugaaugugauggccccuu

SEQ ID NO: 817234 - RNA, 21 nt, Artificial Sequence
  siRNA sense strand as evaluation subject
gauuauggagauauaucguca

SEQ ID NO: 817235 - RNA, 21 nt, Artificial Sequence
  siRNA antisense strand as evaluation subject
acgauauaucuccauaaucua

SEQ ID NO: 817236 - RNA, 21 nt, Artificial Sequence
  siRNA sense strand as evaluation subject
caccagaggcaguaaccaugc

SEQ ID NO: 817237 - RNA, 21 nt, Artificial Sequence
  siRNA antisense strand as evaluation subject
augguuacugccucuggugcc

SEQ ID NO: 817238 - RNA, 21 nt, Artificial Sequence
  siRNA sense strand as evaluation subject
cgaccgugugcucaaaagaag

SEQ ID NO: 817239 - RNA, 21 nt, Artificial Sequence
  siRNA antisense strand as evaluation subject
ucuuuugagcacacggucgcu

SEQ ID NO: 817240 - RNA, 21 nt, Artificial Sequence
  siRNA sense strand as evaluation subject
ggcgcagaucgauuugaauau

SEQ ID NO: 817241 - RNA, 21 nt, Artificial Sequence
  siRNA antisense strand as evaluation subject
auucaaaucgaucugcgccag

SEQ ID NO: 817242 - RNA, 21 nt, Artificial Sequence
  siRNA sense strand as evaluation subject
gcacacacuaccaaucguucc

SEQ ID NO: 817243 - RNA, 21 nt, Artificial Sequence
  siRNA antisense strand as evaluation subject
aacgauugguagugugugcac

SEQ ID NO: 817244 - RNA, 21 nt, Artificial Sequence
  siRNA sense strand as evaluation subject
cgugaaccuccccaucaaugg

SEQ ID NO: 817245 - RNA, 21 nt, Artificial Sequence
  siRNA antisense strand as evaluation subject
auugauggggagguucacgua

SEQ ID NO: 817246 - RNA, 21 nt, Artificial Sequence
  siRNA sense strand as evaluation subject
cggucauuaccgaguacuugc

SEQ ID NO: 817247 - RNA, 21 nt, Artificial Sequence
  siRNA antisense strand as evaluation subject
aaguacucgguaaugaccgug

SEQ ID NO: 817248 - RNA, 21 nt, Artificial Sequence
  siRNA sense strand as evaluation subject
cccagauaccgauguuauacu

SEQ ID NO: 817249 - RNA, 21 nt, Artificial Sequence
  siRNA antisense strand as evaluation subject
uauaacaucgguaucugggua

SEQ ID NO: 817250 - RNA, 21 nt, Artificial Sequence
  siRNA sense strand as evaluation subject
guucccagcgcgaugucaacu

SEQ ID NO: 817251 - RNA, 21 nt, Artificial Sequence
  siRNA antisense strand as evaluation subject
uugacaucgcgcugggaaccg

SEQ ID NO: 817252 - RNA, 21 nt, Artificial Sequence
  siRNA sense strand as evaluation subject
cuaggcaaugcguugguuugu

SEQ ID NO: 817253 - RNA, 21 nt, Artificial Sequence
  siRNA antisense strand as evaluation subject
aaaccaacgcauugccuaggu

SEQ ID NO: 817254 - RNA, 21 nt, Artificial Sequence
  siRNA sense strand as evaluation subject
cugccagauggauacgaauuc

SEQ ID NO: 817255 - RNA, 21 nt, Artificial Sequence
  siRNA antisense strand as evaluation subject
auucguauccaucuggcagcu

SEQ ID NO: 817256 - RNA, 21 nt, Artificial Sequence
  siRNA sense strand as evaluation subject
gugccaugagagaccaauaca

SEQ ID NO: 817257 - RNA, 21 nt, Artificial Sequence
  siRNA antisense strand as evaluation subject
uauuggucucucauggcacug

SEQ ID NO: 817258 - RNA, 21 nt, Artificial Sequence
  siRNA sense strand as evaluation subject
gauaccuuggcgcuaguauuu

SEQ ID NO: 817259 - RNA, 21 nt, Artificial Sequence
  siRNA antisense strand as evaluation subject
auacuagcgccaagguauccg

SEQ ID NO: 817260 - RNA, 21 nt, Artificial Sequence
  siRNA sense strand as evaluation subject
cuguggcucuagacacuaaag

SEQ ID NO: 817261 - RNA, 21 nt, Artificial Sequence
  siRNA antisense strand as evaluation subject
uuagugucuagagccacagca

SEQ ID NO: 817262 - RNA, 21 nt, Artificial Sequence
  siRNA sense strand as evaluation subject
cgcuccaucgggcucaaaugc

SEQ ID NO: 817263 - RNA, 21 nt, Artificial Sequence
  siRNA antisense strand as evaluation subject
auuugagcccgauggagcgca

SEQ ID NO: 817264 - RNA, 21 nt, Artificial Sequence
  siRNA sense strand as evaluation subject
cucaacaagucagaacuaaag

SEQ ID NO: 817265 - RNA, 21 nt, Artificial Sequence
  siRNA antisense strand as evaluation subject
uuaguucugacuuguugagcu

SEQ ID NO: 817266 - RNA, 21 nt, Artificial Sequence
  siRNA sense strand as evaluation subject
cgugugcgaaaccgaauuucc

SEQ ID NO: 817267 - RNA, 21 nt, Artificial Sequence
  siRNA antisense strand as evaluation subject
aaauucgguuucgcacacgua

SEQ ID NO: 817268 - RNA, 21 nt, Artificial Sequence
  siRNA sense strand as evaluation subject
cucaaacgcgccaacgaauuu

SEQ ID NO: 817269 - RNA, 21 nt, Artificial Sequence
  siRNA antisense strand as evaluation subject
auucguuggcgcguuugaggg

SEQ ID NO: 817270 - RNA, 21 nt, Artificial Sequence
  siRNA sense strand as evaluation subject
gacccgaccgacuugagaaac

SEQ ID NO: 817271 - RNA, 21 nt, Artificial Sequence
  siRNA antisense strand as evaluation subject
uucucaagucggucggguccc

SEQ ID NO: 817272 - RNA, 21 nt, Artificial Sequence
  siRNA sense strand as evaluation subject
gaccuagaggacuaucuuaau

SEQ ID NO: 817273 - RNA, 21 nt, Artificial Sequence
  siRNA antisense strand as evaluation subject
uaagauaguccucuaggucag

SEQ ID NO: 817274 - RNA, 21 nt, Artificial Sequence
  siRNA sense strand as evaluation subject
cgguaccacgugaaagacucc

SEQ ID NO: 817275 - RNA, 21 nt, Artificial Sequence
  siRNA antisense strand as evaluation subject
agucuuucacgugguaccgag

SEQ ID NO: 817276 - RNA, 21 nt, Artificial Sequence
  siRNA sense strand as evaluation subject
gucaucaacggaaacauaaag

SEQ ID NO: 817277 - RNA, 21 nt, Artificial Sequence
  siRNA antisense strand as evaluation subject
uuauguuuccguugaugaccu

SEQ ID NO: 817278 - RNA, 21 nt, Artificial Sequence
  siRNA sense strand as evaluation subject
gaagugccgauuguaauuaaa

SEQ ID NO: 817279 - RNA, 21 nt, Artificial Sequence
  siRNA antisense strand as evaluation subject
uaauuacaaucggcacuucuu

SEQ ID NO: 817280 - RNA, 21 nt, Artificial Sequence
  siRNA sense strand as evaluation subject
cgguccauuacgcagauuaag

SEQ ID NO: 817281 - RNA, 21 nt, Artificial Sequence
  siRNA antisense strand as evaluation subject
uaaucugcguaauggaccgcu

SEQ ID NO: 817282 - RNA, 21 nt, Artificial Sequence
  siRNA sense strand as evaluation subject
ccucgaauuagcaaaggaaac

SEQ ID NO: 817283 - RNA, 21 nt, Artificial Sequence
  siRNA antisense strand as evaluation subject
uuccuuugcuaauucgagguc

SEQ ID NO: 817284 - RNA, 21 nt, Artificial Sequence
  siRNA sense strand as evaluation subject
gguugccgggucauguuaauu

SEQ ID NO: 817285 - RNA, 21 nt, Artificial Sequence
  siRNA antisense strand as evaluation subject
uuaacaugacccggcaaccau

SEQ ID NO: 817286 - RNA, 21 nt, Artificial Sequence
  siRNA sense strand as evaluation subject
cgaggggaguacaucaagacc

SEQ ID NO: 817287 - RNA, 21 nt, Artificial Sequence
  siRNA antisense strand as evaluation subject
ucuugauguacuccccucguu

SEQ ID NO: 817288 - RNA, 21 nt, Artificial Sequence
  siRNA sense strand as evaluation subject
cuacauccuaacucgauuugc

SEQ ID NO: 817289 - RNA, 21 nt, Artificial Sequence
  siRNA antisense strand as evaluation subject
aaaucgaguuaggauguaggc

SEQ ID NO: 817290 - RNA, 21 nt, Artificial Sequence
  siRNA sense strand as evaluation subject
gguuacccguuuagaucaaga

SEQ ID NO: 817291 - RNA, 21 nt, Artificial Sequence
  siRNA antisense strand as evaluation subject
uugaucuaaacggguaaccau

SEQ ID NO: 817292 - RNA, 21 nt, Artificial Sequence
  siRNA sense strand as evaluation subject
gggauaccaugcaacauaacc

SEQ ID NO: 817293 - RNA, 21 nt, Artificial Sequence
  siRNA antisense strand as evaluation subject
uuauguugcaugguaucccuc

SEQ ID NO: 817294 - RNA, 21 nt, Artificial Sequence
  siRNA sense strand as evaluation subject
caaccgaguaacugaucuaga

SEQ ID NO: 817295 - RNA, 21 nt, Artificial Sequence
  siRNA antisense strand as evaluation subject
uagaucaguuacucgguugcg

SEQ ID NO: 817296 - RNA, 21 nt, Artificial Sequence
  siRNA sense strand as evaluation subject
cuacgucccuacugucuuuga

SEQ ID NO: 817297 - RNA, 21 nt, Artificial Sequence
  siRNA antisense strand as evaluation subject
aaagacaguagggacguagac

SEQ ID NO: 817298 - RNA, 21 nt, Artificial Sequence
  siRNA sense strand as evaluation subject
gcguuuccaaagucuuaguuu

SEQ ID NO: 817299 - RNA, 21 nt, Artificial Sequence
  siRNA antisense strand as evaluation subject
acuaagacuuuggaaacgcuc

SEQ ID NO: 817300 - RNA, 21 nt, Artificial Sequence
  siRNA sense strand as evaluation subject
gcaaucgguaugaaagacuga

SEQ ID NO: 817301 - RNA, 21 nt, Artificial Sequence
  siRNA antisense strand as evaluation subject
agucuuucauaccgauugcug

SEQ ID NO: 817302 - RNA, 21 nt, Artificial Sequence
  siRNA sense strand as evaluation subject
ccaucgucugguagaaucaac

SEQ ID NO: 817303 - RNA, 21 nt, Artificial Sequence
  siRNA antisense strand as evaluation subject
ugauucuaccagacgaugguu

SEQ ID NO: 817304 - RNA, 21 nt, Artificial Sequence
  siRNA sense strand as evaluation subject
cgacucuaucaggguauaaau

SEQ ID NO: 817305 - RNA, 21 nt, Artificial Sequence
  siRNA antisense strand as evaluation subject
uuauacccugauagagucggu

SEQ ID NO: 817306 - RNA, 21 nt, Artificial Sequence
  siRNA sense strand as evaluation subject
guguggccgaugugucuauug

SEQ ID NO: 817307 - RNA, 21 nt, Artificial Sequence
  siRNA antisense strand as evaluation subject
auagacacaucggccacacca

SEQ ID NO: 817308 - RNA, 21 nt, Artificial Sequence
  siRNA sense strand as evaluation subject
gcuaguccacgauacaucuuu

SEQ ID NO: 817309 - RNA, 21 nt, Artificial Sequence
  siRNA antisense strand as evaluation subject
agauguaucguggacuagcag

SEQ ID NO: 817310 - RNA, 21 nt, Artificial Sequence
  siRNA sense strand as evaluation subject
guggacggcacguggauuaug

SEQ ID NO: 817311 - RNA, 21 nt, Artificial Sequence
  siRNA antisense strand as evaluation subject
uaauccacgugccguccaccu

SEQ ID NO: 817312 - RNA, 21 nt, Artificial Sequence
  siRNA sense strand as evaluation subject
ggugguccagccuuacaauuc

SEQ ID NO: 817313 - RNA, 21 nt, Artificial Sequence
  siRNA antisense strand as evaluation subject
auuguaaggcuggaccaccac

SEQ ID NO: 817314 - RNA, 21 nt, Artificial Sequence
  siRNA sense strand as evaluation subject
cuuccggaucccaagaacacu

SEQ ID NO: 817315 - RNA, 21 nt, Artificial Sequence
  siRNA antisense strand as evaluation subject
uguucuugggauccggaagca

SEQ ID NO: 817316 - RNA, 21 nt, Artificial Sequence
  siRNA sense strand as evaluation subject
cgacaucucgggagauacuuc

SEQ ID NO: 817317 - RNA, 21 nt, Artificial Sequence
  siRNA antisense strand as evaluation subject
aguaucucccgagaugucgug

SEQ ID NO: 817318 - RNA, 21 nt, Artificial Sequence
  siRNA sense strand as evaluation subject
ccguagcggcauuaucugaaa

SEQ ID NO: 817319 - RNA, 21 nt, Artificial Sequence
  siRNA antisense strand as evaluation subject
ucagauaaugccgcuacggca

SEQ ID NO: 817320 - RNA, 21 nt, Artificial Sequence
  siRNA sense strand as evaluation subject
gcugacaggucaauacuaucu

SEQ ID NO: 817321 - RNA, 21 nt, Artificial Sequence
  siRNA antisense strand as evaluation subject
auaguauugaccugucagcau

SEQ ID NO: 817322 - RNA, 21 nt, Artificial Sequence
  siRNA sense strand as evaluation subject
cgagcaagguccuuccauagu

SEQ ID NO: 817323 - RNA, 21 nt, Artificial Sequence
  siRNA antisense strand as evaluation subject
uauggaaggaccuugcucgca

SEQ ID NO: 817324 - RNA, 21 nt, Artificial Sequence
  siRNA sense strand as evaluation subject
gaaggagacccguuauggaga

SEQ ID NO: 817325 - RNA, 21 nt, Artificial Sequence
  siRNA antisense strand as evaluation subject
uccauaacgggucuccuucuu

SEQ ID NO: 817326 - RNA, 21 nt, Artificial Sequence
  siRNA sense strand as evaluation subject
ccgcagcucuguauaaggucu

SEQ ID NO: 817327 - RNA, 21 nt, Artificial Sequence
  siRNA antisense strand as evaluation subject
accuuauacagagcugcggcc

SEQ ID NO: 817328 - RNA, 21 nt, Artificial Sequence
  siRNA sense strand as evaluation subject
cgaacggauuuuuuauccaga

SEQ ID NO: 817329 - RNA, 21 nt, Artificial Sequence
  siRNA antisense strand as evaluation subject
uggauaaaaaauccguucgca

SEQ ID NO: 817330 - RNA, 21 nt, Artificial Sequence
  siRNA sense strand as evaluation subject
ccgugugucccagcaauaagc

SEQ ID NO: 817331 - RNA, 21 nt, Artificial Sequence
  siRNA antisense strand as evaluation subject
uuauugcugggacacacggau

SEQ ID NO: 817332 - RNA, 21 nt, Artificial Sequence
  siRNA sense strand as evaluation subject
cggagaucgaagacuaacaaa

SEQ ID NO: 817333 - RNA, 21 nt, Artificial Sequence
  siRNA antisense strand as evaluation subject
uguuagucuucgaucuccgcc

SEQ ID NO: 817334 - RNA, 21 nt, Artificial Sequence
  siRNA sense strand as evaluation subject
ccgccuacaggaguaugaugc

SEQ ID NO: 817335 - RNA, 21 nt, Artificial Sequence
  siRNA antisense strand as evaluation subject
aucauacuccuguaggcggug

SEQ ID NO: 817336 - RNA, 21 nt, Artificial Sequence
  siRNA sense strand as evaluation subject
gcuacugcgacgccaaauacg

SEQ ID NO: 817337 - RNA, 21 nt, Artificial Sequence
  siRNA antisense strand as evaluation subject
uauuuggcgucgcaguagccg

SEQ ID NO: 817338 - RNA, 21 nt, Artificial Sequence
  siRNA sense strand as evaluation subject
caagaucugcggugacauaca

SEQ ID NO: 817339 - RNA, 21 nt, Artificial Sequence
  siRNA antisense strand as evaluation subject
uaugucaccgcagaucuugag

SEQ ID NO: 817340 - RNA, 21 nt, Artificial Sequence
  siRNA sense strand as evaluation subject
gcuaaacgacaguugguaacc

SEQ ID NO: 817341 - RNA, 21 nt, Artificial Sequence
  siRNA antisense strand as evaluation subject
uuaccaacugucguuuagcaa

SEQ ID NO: 817342 - RNA, 21 nt, Artificial Sequence
  siRNA sense strand as evaluation subject
cgccuccaagggguaugauca

SEQ ID NO: 817343 - RNA, 21 nt, Artificial Sequence
  siRNA antisense strand as evaluation subject
aucauaccccuuggaggcguu

SEQ ID NO: 817344 - RNA, 21 nt, Artificial Sequence
  siRNA sense strand as evaluation subject
ccgaaagggacgaugacuaug

SEQ ID NO: 817345 - RNA, 21 nt, Artificial Sequence
  siRNA antisense strand as evaluation subject
uagucaucgucccuuucggug

SEQ ID NO: 817346 - RNA, 21 nt, Artificial Sequence
  siRNA sense strand as evaluation subject
cggcucguacuccaucaauuu

SEQ ID NO: 817347 - RNA, 21 nt, Artificial Sequence
  siRNA antisense strand as evaluation subject
auugauggaguacgagccggu

SEQ ID NO: 817348 - RNA, 21 nt, Artificial Sequence
  siRNA sense strand as evaluation subject
cgauuccgucaagagauaaca

SEQ ID NO: 817349 - RNA, 21 nt, Artificial Sequence
  siRNA antisense strand as evaluation subject
uuaucucuugacggaaucguc

SEQ ID NO: 817350 - RNA, 21 nt, Artificial Sequence
  siRNA sense strand as evaluation subject
gaauccuuagcgaugagaucu

SEQ ID NO: 817351 - RNA, 21 nt, Artificial Sequence
  siRNA antisense strand as evaluation subject
aucucaucgcuaaggauuccu

SEQ ID NO: 817352 - RNA, 21 nt, Artificial Sequence
  siRNA sense strand as evaluation subject
cugauuaagacgguugaaacu

SEQ ID NO: 817353 - RNA, 21 nt, Artificial Sequence
  siRNA antisense strand as evaluation subject
uuucaaccgucuuaaucagga

SEQ ID NO: 817354 - RNA, 21 nt, Artificial Sequence
  siRNA sense strand as evaluation subject
gaacgagugauuaguacuaaa

SEQ ID NO: 817355 - RNA, 21 nt, Artificial Sequence
  siRNA antisense strand as evaluation subject
uaguacuaaucacucguucca

SEQ ID NO: 817356 - RNA, 21 nt, Artificial Sequence
  siRNA sense strand as evaluation subject
ggcauguggcgucauaguaga

SEQ ID NO: 817357 - RNA, 21 nt, Artificial Sequence
  siRNA antisense strand as evaluation subject
uacuaugacgccacaugccuc

SEQ ID NO: 817358 - RNA, 21 nt, Artificial Sequence
  siRNA sense strand as evaluation subject
ccacgcaggcgggauuaaugu

SEQ ID NO: 817359 - RNA, 21 nt, Artificial Sequence
  siRNA antisense strand as evaluation subject
auuaaucccgccugcguggcu

SEQ ID NO: 817360 - RNA, 21 nt, Artificial Sequence
  siRNA sense strand as evaluation subject
cagccguagucuugauugugg

SEQ ID NO: 817361 - RNA, 21 nt, Artificial Sequence
  siRNA antisense strand as evaluation subject
acaaucaagacuacggcugca

SEQ ID NO: 817362 - RNA, 21 nt, Artificial Sequence
  siRNA sense strand as evaluation subject
cgagcuggcaugaucuucuac

SEQ ID NO: 817363 - RNA, 21 nt, Artificial Sequence
  siRNA antisense strand as evaluation subject
agaagaucaugccagcucggc

SEQ ID NO: 817364 - RNA, 21 nt, Artificial Sequence
  siRNA sense strand as evaluation subject
ggagguugccuauaucgaugg

SEQ ID NO: 817365 - RNA, 21 nt, Artificial Sequence
  siRNA antisense strand as evaluation subject
aucgauauaggcaaccucccc

SEQ ID NO: 817366 - RNA, 21 nt, Artificial Sequence
  siRNA sense strand as evaluation subject
cgcaacugcggcauagcaacc

SEQ ID NO: 817367 - RNA, 21 nt, Artificial Sequence
  siRNA antisense strand as evaluation subject
uugcuaugccgcaguugcguc

SEQ ID NO: 817368 - RNA, 21 nt, Artificial Sequence
  siRNA sense strand as evaluation subject
cggagggcgaugaaacguuuc

SEQ ID NO: 817369 - RNA, 21 nt, Artificial Sequence
  siRNA antisense strand as evaluation subject
aacguuucaucgcccuccgaa

SEQ ID NO: 817370 - RNA, 21 nt, Artificial Sequence
  siRNA sense strand as evaluation subject
caaugcacggcguguacauga

SEQ ID NO: 817371 - RNA, 21 nt, Artificial Sequence
  siRNA antisense strand as evaluation subject
auguacacgccgugcauuggg

SEQ ID NO: 817372 - RNA, 21 nt, Artificial Sequence
  siRNA sense strand as evaluation subject
guccuuuagggcauagugaug

SEQ ID NO: 817373 - RNA, 21 nt, Artificial Sequence
  siRNA antisense strand as evaluation subject
ucacuaugcccuaaaggacac

SEQ ID NO: 817374 - RNA, 21 nt, Artificial Sequence
  siRNA sense strand as evaluation subject
ggucaauuaugaagaguuugu

SEQ ID NO: 817375 - RNA, 21 nt, Artificial Sequence
  siRNA antisense strand as evaluation subject
aaacucuucauaauugaccug

SEQ ID NO: 817376 - RNA, 21 nt, Artificial Sequence
  siRNA sense strand as evaluation subject
gccgcugcuggauggauuaaa

SEQ ID NO: 817377 - RNA, 21 nt, Artificial Sequence
  siRNA antisense strand as evaluation subject
uaauccauccagcagcggcug

SEQ ID NO: 817378 - RNA, 21 nt, Artificial Sequence
  siRNA sense strand as evaluation subject
gcgagaugcgagaacacuuuu

SEQ ID NO: 817379 - RNA, 21 nt, Artificial Sequence
  siRNA antisense strand as evaluation subject
aaguguucucgcaucucgcuc

SEQ ID NO: 817380 - RNA, 21 nt, Artificial Sequence
  siRNA sense strand as evaluation subject
caaguucggcucuaccaaaau

SEQ ID NO: 817381 - RNA, 21 nt, Artificial Sequence
  siRNA antisense strand as evaluation subject
uuugguagagccgaacuuggu

SEQ ID NO: 817382 - RNA, 21 nt, Artificial Sequence
  siRNA sense strand as evaluation subject
gccgucuaucagcuaacuaga

SEQ ID NO: 817383 - RNA, 21 nt, Artificial Sequence
  siRNA antisense strand as evaluation subject
uaguuagcugauagacggcuu

SEQ ID NO: 817384 - RNA, 21 nt, Artificial Sequence
  siRNA sense strand as evaluation subject
ccaccacgaggcgauuugugg

SEQ ID NO: 817385 - RNA, 21 nt, Artificial Sequence
  siRNA antisense strand as evaluation subject
acaaaucgccucgugguggug

SEQ ID NO: 817386 - RNA, 21 nt, Artificial Sequence
  siRNA sense strand as evaluation subject
guauguuucaacuaaucgugg

SEQ ID NO: 817387 - RNA, 21 nt, Artificial Sequence
  siRNA antisense strand as evaluation subject
acgauuaguugaaacauacuc

SEQ ID NO: 817388 - RNA, 21 nt, Artificial Sequence
  siRNA sense strand as evaluation subject
caaaggcuacgcuacguuacu

SEQ ID NO: 817389 - RNA, 21 nt, Artificial Sequence
  siRNA antisense strand as evaluation subject
uaacguagcguagccuuugga

SEQ ID NO: 817390 - RNA, 21 nt, Artificial Sequence
  siRNA sense strand as evaluation subject
ggcuacgaaggcuauuacagc

SEQ ID NO: 817391 - RNA, 21 nt, Artificial Sequence
  siRNA antisense strand as evaluation subject
uguaauagccuucguagccuu

SEQ ID NO: 817392 - RNA, 21 nt, Artificial Sequence
  siRNA sense strand as evaluation subject
gccggugacacaacaguauua

SEQ ID NO: 817393 - RNA, 21 nt, Artificial Sequence
  siRNA antisense strand as evaluation subject
auacuguugugucaccggcau

SEQ ID NO: 817394 - RNA, 21 nt, Artificial Sequence
  siRNA sense strand as evaluation subject
cgucacgucaugacaaacuua

SEQ ID NO: 817395 - RNA, 21 nt, Artificial Sequence
  siRNA antisense strand as evaluation subject
aguuugucaugacgugacgua

SEQ ID NO: 817396 - RNA, 21 nt, Artificial Sequence
  siRNA sense strand as evaluation subject
gcaaguugcguaagugaauca

SEQ ID NO: 817397 - RNA, 21 nt, Artificial Sequence
  siRNA antisense strand as evaluation subject
auucacuuacgcaacuugcau

SEQ ID NO: 817398 - RNA, 21 nt, Artificial Sequence
  siRNA sense strand as evaluation subject
cuuacgacuuacaaggauuag

SEQ ID NO: 817399 - RNA, 21 nt, Artificial Sequence
  siRNA antisense strand as evaluation subject
aauccuuguaagucguaaggc

SEQ ID NO: 817400 - RNA, 21 nt, Artificial Sequence
  siRNA sense strand as evaluation subject
gggcugcgaccaauggaaaca

SEQ ID NO: 817401 - RNA, 21 nt, Artificial Sequence
  siRNA antisense strand as evaluation subject
uuuccauuggucgcagcccag

SEQ ID NO: 817402 - RNA, 21 nt, Artificial Sequence
  siRNA sense strand as evaluation subject
cugacuacaucggauucaucc

SEQ ID NO: 817403 - RNA, 21 nt, Artificial Sequence
  siRNA antisense strand as evaluation subject
augaauccgauguagucagcg

SEQ ID NO: 817404 - RNA, 21 nt, Artificial Sequence
  siRNA sense strand as evaluation subject
cggcgacuguucuauaacuuu

SEQ ID NO: 817405 - RNA, 21 nt, Artificial Sequence
  siRNA antisense strand as evaluation subject
aguuauagaacagucgccgca

SEQ ID NO: 817406 - RNA, 21 nt, Artificial Sequence
  siRNA sense strand as evaluation subject
gccguguguuugauaugcuua

SEQ ID NO: 817407 - RNA, 21 nt, Artificial Sequence
  siRNA antisense strand as evaluation subject
agcauaucaaacacacggcca

SEQ ID NO: 817408 - RNA, 21 nt, Artificial Sequence
  siRNA sense strand as evaluation subject
ccccauacccgaugacaaugg

SEQ ID NO: 817409 - RNA, 21 nt, Artificial Sequence
  siRNA antisense strand as evaluation subject
auugucaucggguauggggau

SEQ ID NO: 817410 - RNA, 21 nt, Artificial Sequence
  siRNA sense strand as evaluation subject
ccgagcgcauauugaguauca

SEQ ID NO: 817411 - RNA, 21 nt, Artificial Sequence
  siRNA antisense strand as evaluation subject
auacucaauaugcgcucgggg

SEQ ID NO: 817412 - RNA, 21 nt, Artificial Sequence
  siRNA sense strand as evaluation subject
cgcauugacgaauuugagucu

SEQ ID NO: 817413 - RNA, 21 nt, Artificial Sequence
  siRNA antisense strand as evaluation subject
acucaaauucgucaaugcgcu

SEQ ID NO: 817414 - RNA, 21 nt, Artificial Sequence
  siRNA sense strand as evaluation subject
ggccuguacauaacaacuuug

SEQ ID NO: 817415 - RNA, 21 nt, Artificial Sequence
  siRNA antisense strand as evaluation subject
aaguuguuauguacaggccaa

SEQ ID NO: 817416 - RNA, 21 nt, Artificial Sequence
  siRNA sense strand as evaluation subject
cuacggggcacuauucagaga

SEQ ID NO: 817417 - RNA, 21 nt, Artificial Sequence
  siRNA antisense strand as evaluation subject
ucugaauagugccccguagaa

SEQ ID NO: 817418 - RNA, 21 nt, Artificial Sequence
  siRNA sense strand as evaluation subject
caacguaagaguaacuacaau

SEQ ID NO: 817419 - RNA, 21 nt, Artificial Sequence
  siRNA antisense strand as evaluation subject
uguaguuacucuuacguugau

SEQ ID NO: 817420 - RNA, 21 nt, Artificial Sequence
  siRNA sense strand as evaluation subject
gaaaggaucggcgcaauuaag

SEQ ID NO: 817421 - RNA, 21 nt, Artificial Sequence
  siRNA antisense strand as evaluation subject
uaauugcgccgauccuuucuc

SEQ ID NO: 817422 - RNA, 21 nt, Artificial Sequence
  siRNA sense strand as evaluation subject
cucaccgagcacguaugaucu

SEQ ID NO: 817423 - RNA, 21 nt, Artificial Sequence
  siRNA antisense strand as evaluation subject
aucauacgugcucggugaggu

SEQ ID NO: 817424 - RNA, 21 nt, Artificial Sequence
  siRNA sense strand as evaluation subject
ccgaccgcccucauugacucc

SEQ ID NO: 817425 - RNA, 21 nt, Artificial Sequence
  siRNA antisense strand as evaluation subject
agucaaugagggcggucgggg

SEQ ID NO: 817426 - RNA, 21 nt, Artificial Sequence
  siRNA sense strand as evaluation subject
gaacggucugcgaagaaguuc

SEQ ID NO: 817427 - RNA, 21 nt, Artificial Sequence
  siRNA antisense strand as evaluation subject
acuucuucgcagaccguucac

SEQ ID NO: 817428 - RNA, 21 nt, Artificial Sequence
  siRNA sense strand as evaluation subject
gacccuaucggaaacucaaaa

SEQ ID NO: 817429 - RNA, 21 nt, Artificial Sequence
  siRNA antisense strand as evaluation subject
uugaguuuccgauagggucag

SEQ ID NO: 817430 - RNA, 21 nt, Artificial Sequence
  siRNA sense strand as evaluation subject
ggagcgaauccguuuagcucg

SEQ ID NO: 817431 - RNA, 21 nt, Artificial Sequence
  siRNA antisense strand as evaluation subject
agcuaaacggauucgcuccuu

SEQ ID NO: 817432 - RNA, 21 nt, Artificial Sequence
  siRNA sense strand as evaluation subject
ccguagagguaaagaacuaug

SEQ ID NO: 817433 - RNA, 21 nt, Artificial Sequence
  siRNA antisense strand as evaluation subject
uaguucuuuaccucuacggua

SEQ ID NO: 817434 - RNA, 21 nt, Artificial Sequence
  siRNA sense strand as evaluation subject
cggcuggagaccuauuacaag

SEQ ID NO: 817435 - RNA, 21 nt, Artificial Sequence
  siRNA antisense strand as evaluation subject
uguaauaggucuccagccgcu

SEQ ID NO: 817436 - RNA, 21 nt, Artificial Sequence
  siRNA sense strand as evaluation subject
cgcccgauggccauuacuacg

SEQ ID NO: 817437 - RNA, 21 nt, Artificial Sequence
  siRNA antisense strand as evaluation subject
uaguaauggccaucgggcgug

SEQ ID NO: 817438 - RNA, 21 nt, Artificial Sequence
  siRNA sense strand as evaluation subject
ggagucucguacuauauaaau

SEQ ID NO: 817439 - RNA, 21 nt, Artificial Sequence
  siRNA antisense strand as evaluation subject
uuauauaguacgagacuccgu

SEQ ID NO: 817440 - RNA, 21 nt, Artificial Sequence
  siRNA sense strand as evaluation subject
gggcccauacgaaaccuauga

SEQ ID NO: 817441 - RNA, 21 nt, Artificial Sequence
  siRNA antisense strand as evaluation subject
auagguuucguaugggcccug

SEQ ID NO: 817442 - RNA, 21 nt, Artificial Sequence
  siRNA sense strand as evaluation subject
gcuccgccuaggaaagaaucu

SEQ ID NO: 817443 - RNA, 21 nt, Artificial Sequence
  siRNA antisense strand as evaluation subject
auucuuuccuaggcggagcuc

SEQ ID NO: 817444 - RNA, 21 nt, Artificial Sequence
  siRNA sense strand as evaluation subject
cugauauccuacacaacaaac

SEQ ID NO: 817445 - RNA, 21 nt, Artificial Sequence
  siRNA antisense strand as evaluation subject
uuguuguguaggauaucagga

SEQ ID NO: 817446 - RNA, 21 nt, Artificial Sequence
  siRNA sense strand as evaluation subject
gccgguaccauguugacaaca

SEQ ID NO: 817447 - RNA, 21 nt, Artificial Sequence
  siRNA antisense strand as evaluation subject
uugucaacaugguaccggcau

SEQ ID NO: 817448 - RNA, 21 nt, Artificial Sequence
  siRNA sense strand as evaluation subject
guaaguacgucaauaaggaaa

SEQ ID NO: 817449 - RNA, 21 nt, Artificial Sequence
  siRNA antisense strand as evaluation subject
uccuuauugacguacuuacuu

SEQ ID NO: 817450 - RNA, 21 nt, Artificial Sequence
  siRNA sense strand as evaluation subject
ggcuaaaggcugcaacaaaga

SEQ ID NO: 817451 - RNA, 21 nt, Artificial Sequence
  siRNA antisense strand as evaluation subject
uuuguugcagccuuuagcccu

SEQ ID NO: 817452 - RNA, 21 nt, Artificial Sequence
  siRNA sense strand as evaluation subject
cgcaucgaauacauucauuca

SEQ ID NO: 817453 - RNA, 21 nt, Artificial Sequence
  siRNA antisense strand as evaluation subject
aaugaauguauucgaugcgac

SEQ ID NO: 817454 - RNA, 21 nt, Artificial Sequence
  siRNA sense strand as evaluation subject
cguuccgauccucuauacugc

SEQ ID NO: 817455 - RNA, 21 nt, Artificial Sequence
  siRNA antisense strand as evaluation subject
aguauagaggaucggaacguu

SEQ ID NO: 817456 - RNA, 21 nt, Artificial Sequence
  siRNA sense strand as evaluation subject
cuaugcagguccacuguaaca

SEQ ID NO: 817457 - RNA, 21 nt, Artificial Sequence
  siRNA antisense strand as evaluation subject
uuacaguggaccugcauagcc

SEQ ID NO: 817458 - RNA, 21 nt, Artificial Sequence
  siRNA sense strand as evaluation subject
ccugcuacccaaaauaccuuu

SEQ ID NO: 817459 - RNA, 21 nt, Artificial Sequence
  siRNA antisense strand as evaluation subject
agguauuuuggguagcaggag

SEQ ID NO: 817460 - RNA, 21 nt, Artificial Sequence
  siRNA sense strand as evaluation subject
gcuggcaagcguaauguuauu

SEQ ID NO: 817461 - RNA, 21 nt, Artificial Sequence
  siRNA antisense strand as evaluation subject
uaacauuacgcuugccagcaa

SEQ ID NO: 817462 - RNA, 21 nt, Artificial Sequence
  siRNA sense strand as evaluation subject
guucccgacuccuauaaguca

SEQ ID NO: 817463 - RNA, 21 nt, Artificial Sequence
  siRNA antisense strand as evaluation subject
acuuauaggagucgggaaccu

SEQ ID NO: 817464 - RNA, 21 nt, Artificial Sequence
  siRNA sense strand as evaluation subject
caacgacgagucucgaauuaa

SEQ ID NO: 817465 - RNA, 21 nt, Artificial Sequence
  siRNA antisense strand as evaluation subject
aauucgagacucgucguugua

SEQ ID NO: 817466 - RNA, 21 nt, Artificial Sequence
  siRNA sense strand as evaluation subject
cguaucgcggcuuuaaauacc

SEQ ID NO: 817467 - RNA, 21 nt, Artificial Sequence
  siRNA antisense strand as evaluation subject
uauuuaaagccgcgauacgca

SEQ ID NO: 817468 - RNA, 21 nt, Artificial Sequence
  siRNA sense strand as evaluation subject
cgacgacuacauugaacaaac

SEQ ID NO: 817469 - RNA, 21 nt, Artificial Sequence
  siRNA antisense strand as evaluation subject
uuguucaauguagucgucguc

SEQ ID NO: 817470 - RNA, 21 nt, Artificial Sequence
  siRNA sense strand as evaluation subject
gucgaguguugcucgauaaug

SEQ ID NO: 817471 - RNA, 21 nt, Artificial Sequence
  siRNA antisense strand as evaluation subject
uuaucgagcaacacucgacaa

SEQ ID NO: 817472 - RNA, 21 nt, Artificial Sequence
  siRNA sense strand as evaluation subject
gcccaggcggauaucuacaag

SEQ ID NO: 817473 - RNA, 21 nt, Artificial Sequence
  siRNA antisense strand as evaluation subject
uguagauauccgccugggccu

SEQ ID NO: 817474 - RNA, 21 nt, Artificial Sequence
  siRNA sense strand as evaluation subject
gcugccguggauacuuaguuc

SEQ ID NO: 817475 - RNA, 21 nt, Artificial Sequence
  siRNA antisense strand as evaluation subject
acuaaguauccacggcagcga

SEQ ID NO: 817476 - RNA, 21 nt, Artificial Sequence
  siRNA sense strand as evaluation subject
ggucgcguuuacauaaacaag

SEQ ID NO: 817477 - RNA, 21 nt, Artificial Sequence
  siRNA antisense strand as evaluation subject
uguuuauguaaacgcgaccuc

SEQ ID NO: 817478 - RNA, 21 nt, Artificial Sequence
  siRNA sense strand as evaluation subject
caccgcaggacguucaaaugc

SEQ ID NO: 817479 - RNA, 21 nt, Artificial Sequence
  siRNA antisense strand as evaluation subject
auuugaacguccugcgguggg

SEQ ID NO: 817480 - RNA, 21 nt, Artificial Sequence
  siRNA sense strand as evaluation subject
guuacaucacgucagauaugu

SEQ ID NO: 817481 - RNA, 21 nt, Artificial Sequence
  siRNA antisense strand as evaluation subject
auaucugacgugauguaacau

SEQ ID NO: 817482 - RNA, 21 nt, Artificial Sequence
  siRNA sense strand as evaluation subject
ggcacguuugaguacgaauau

SEQ ID NO: 817483 - RNA, 21 nt, Artificial Sequence
  siRNA antisense strand as evaluation subject
auucguacucaaacgugccau

SEQ ID NO: 817484 - RNA, 21 nt, Artificial Sequence
  siRNA sense strand as evaluation subject
caaucguagauacuuaucuuc

SEQ ID NO: 817485 - RNA, 21 nt, Artificial Sequence
  siRNA antisense strand as evaluation subject
agauaaguaucuacgauugcu

SEQ ID NO: 817486 - RNA, 21 nt, Artificial Sequence
  siRNA sense strand as evaluation subject
cgguaauaguggguucaauga

SEQ ID NO: 817487 - RNA, 21 nt, Artificial Sequence
  siRNA antisense strand as evaluation subject
auugaacccacuauuaccguc

SEQ ID NO: 817488 - RNA, 21 nt, Artificial Sequence
  siRNA sense strand as evaluation subject
cgcucaccagggaguauaagc

SEQ ID NO: 817489 - RNA, 21 nt, Artificial Sequence
  siRNA antisense strand as evaluation subject
uuauacucccuggugagcggg

SEQ ID NO: 817490 - RNA, 21 nt, Artificial Sequence
  siRNA sense strand as evaluation subject
gaccgaacuggacacuaaaga

SEQ ID NO: 817491 - RNA, 21 nt, Artificial Sequence
  siRNA antisense strand as evaluation subject
uuuaguguccaguucggucag

SEQ ID NO: 817492 - RNA, 21 nt, Artificial Sequence
  siRNA sense strand as evaluation subject
gugugauuacgcuuguagaca

SEQ ID NO: 817493 - RNA, 21 nt, Artificial Sequence
  siRNA antisense strand as evaluation subject
ucuacaagcguaaucacacug

SEQ ID NO: 817494 - RNA, 21 nt, Artificial Sequence
  siRNA sense strand as evaluation subject
cggucgggcaguccuuauugc

SEQ ID NO: 817495 - RNA, 21 nt, Artificial Sequence
  siRNA antisense strand as evaluation subject
aauaaggacugcccgaccggc

SEQ ID NO: 817496 - RNA, 21 nt, Artificial Sequence
  siRNA sense strand as evaluation subject
guauaagggcgcuaaucguac

SEQ ID NO: 817497 - RNA, 21 nt, Artificial Sequence
  siRNA antisense strand as evaluation subject
acgauuagcgcccuuauacau

SEQ ID NO: 817498 - RNA, 21 nt, Artificial Sequence
  siRNA sense strand as evaluation subject
gagauccuucgauuguuuuuu

SEQ ID NO: 817499 - RNA, 21 nt, Artificial Sequence
  siRNA antisense strand as evaluation subject
aaaacaaucgaaggaucucaa

SEQ ID NO: 817500 - RNA, 21 nt, Artificial Sequence
  siRNA sense strand as evaluation subject
cccguccucacaagcuuuaac

SEQ ID NO: 817501 - RNA, 21 nt, Artificial Sequence
  siRNA antisense strand as evaluation subject
uaaagcuugugaggacggggu

SEQ ID NO: 817502 - RNA, 21 nt, Artificial Sequence
  siRNA sense strand as evaluation subject
gccauaguucgauaugcuuau

SEQ ID NO: 817503 - RNA, 21 nt, Artificial Sequence
  siRNA antisense strand as evaluation subject
aagcauaucgaacuauggcca

SEQ ID NO: 817504 - RNA, 21 nt, Artificial Sequence
  siRNA sense strand as evaluation subject
ccucgucacguguucaauaug

SEQ ID NO: 817505 - RNA, 21 nt, Artificial Sequence
  siRNA antisense strand as evaluation subject
uauugaacacgugacgaggcc

SEQ ID NO: 817506 - RNA, 21 nt, Artificial Sequence
  siRNA sense strand as evaluation subject
cuaggcuccgauaggauuaug

SEQ ID NO: 817507 - RNA, 21 nt, Artificial Sequence
  siRNA antisense strand as evaluation subject
uaauccuaucggagccuagaa

SEQ ID NO: 817508 - RNA, 21 nt, Artificial Sequence
  siRNA sense strand as evaluation subject
cguaccuguccggauauauuu

SEQ ID NO: 817509 - RNA, 21 nt, Artificial Sequence
  siRNA antisense strand as evaluation subject
auauauccggacagguacgag

SEQ ID NO: 817510 - RNA, 21 nt, Artificial Sequence
  siRNA sense strand as evaluation subject
cgugagguggcuuuacugagg

SEQ ID NO: 817511 - RNA, 21 nt, Artificial Sequence
  siRNA antisense strand as evaluation subject
ucaguaaagccaccucacgaa

SEQ ID NO: 817512 - RNA, 21 nt, Artificial Sequence
  siRNA sense strand as evaluation subject
cguaagcgauacaacuugacc

SEQ ID NO: 817513 - RNA, 21 nt, Artificial Sequence
  siRNA antisense strand as evaluation subject
ucaaguuguaucgcuuacgga

SEQ ID NO: 817514 - RNA, 21 nt, Artificial Sequence
  siRNA sense strand as evaluation subject
gcgaggucaccuuugcauugc

SEQ ID NO: 817515 - RNA, 21 nt, Artificial Sequence
  siRNA antisense strand as evaluation subject
aaugcaaaggugaccucgcua

SEQ ID NO: 817516 - RNA, 21 nt, Artificial Sequence
  siRNA sense strand as evaluation subject
caucgugagagcaauucgaga

SEQ ID NO: 817517 - RNA, 21 nt, Artificial Sequence
  siRNA antisense strand as evaluation subject
ucgaauugcucucacgaugcc

SEQ ID NO: 817518 - RNA, 21 nt, Artificial Sequence
  siRNA sense strand as evaluation subject
guacuucgaccgaguagauga

SEQ ID NO: 817519 - RNA, 21 nt, Artificial Sequence
  siRNA antisense strand as evaluation subject
aucuacucggucgaaguaccu

SEQ ID NO: 817520 - RNA, 21 nt, Artificial Sequence
  siRNA sense strand as evaluation subject
ccaugacggcacguauacagu

SEQ ID NO: 817521 - RNA, 21 nt, Artificial Sequence
  siRNA antisense strand as evaluation subject
uguauacgugccgucaugguu

SEQ ID NO: 817522 - RNA, 21 nt, Artificial Sequence
  siRNA sense strand as evaluation subject
cagucccgacacuaacuauac

SEQ ID NO: 817523 - RNA, 21 nt, Artificial Sequence
  siRNA antisense strand as evaluation subject
auaguuagugucgggacuggu

SEQ ID NO: 817524 - RNA, 21 nt, Artificial Sequence
  siRNA sense strand as evaluation subject
caucauacgaaggauacuuuc

SEQ ID NO: 817525 - RNA, 21 nt, Artificial Sequence
  siRNA antisense strand as evaluation subject
aaguauccuucguaugaugaa

SEQ ID NO: 817526 - RNA, 21 nt, Artificial Sequence
  siRNA sense strand as evaluation subject
cgcucuggcggcauuacuaca

SEQ ID NO: 817527 - RNA, 21 nt, Artificial Sequence
  siRNA antisense strand as evaluation subject
uaguaaugccgccagagcggc

SEQ ID NO: 817528 - RNA, 21 nt, Artificial Sequence
  siRNA sense strand as evaluation subject
gcuucguucgagaacaacugu

SEQ ID NO: 817529 - RNA, 21 nt, Artificial Sequence
  siRNA antisense strand as evaluation subject
aguuguucucgaacgaagcuc

SEQ ID NO: 817530 - RNA, 21 nt, Artificial Sequence
  siRNA sense strand as evaluation subject
ggagcccaucgguacagaucu

SEQ ID NO: 817531 - RNA, 21 nt, Artificial Sequence
  siRNA antisense strand as evaluation subject
aucuguaccgaugggcuccug

SEQ ID NO: 817532 - RNA, 21 nt, Artificial Sequence
  siRNA sense strand as evaluation subject
cugguugacuacaagucuugu

SEQ ID NO: 817533 - RNA, 21 nt, Artificial Sequence
  siRNA antisense strand as evaluation subject
aagacuuguagucaaccaguu

SEQ ID NO: 817534 - RNA, 21 nt, Artificial Sequence
  siRNA sense strand as evaluation subject
gaacggccaagguuuugcacu

SEQ ID NO: 817535 - RNA, 21 nt, Artificial Sequence
  siRNA antisense strand as evaluation subject
ugcaaaaccuuggccguucuu

SEQ ID NO: 817536 - RNA, 21 nt, Artificial Sequence
  siRNA sense strand as evaluation subject
caguggauucgaaagcuaugg

SEQ ID NO: 817537 - RNA, 21 nt, Artificial Sequence
  siRNA antisense strand as evaluation subject
auagcuuucgaauccacuguu

SEQ ID NO: 817538 - RNA, 21 nt, Artificial Sequence
  siRNA sense strand as evaluation subject
gcaccuacuaaggaguuuuau

SEQ ID NO: 817539 - RNA, 21 nt, Artificial Sequence
  siRNA antisense strand as evaluation subject
aaaacuccuuaguaggugccu

SEQ ID NO: 817540 - RNA, 21 nt, Artificial Sequence
  siRNA sense strand as evaluation subject
caccgaacccaagaaacuaga

SEQ ID NO: 817541 - RNA, 21 nt, Artificial Sequence
  siRNA antisense strand as evaluation subject
uaguuucuuggguucgguggg

SEQ ID NO: 817542 - RNA, 21 nt, Artificial Sequence
  siRNA sense strand as evaluation subject
cuuacgcgugcgggauauuaa

SEQ ID NO: 817543 - RNA, 21 nt, Artificial Sequence
  siRNA antisense strand as evaluation subject
aauaucccgcacgcguaagcg

SEQ ID NO: 817544 - RNA, 21 nt, Artificial Sequence
  siRNA sense strand as evaluation subject
cgcagcgaggaguuucucauu

SEQ ID NO: 817545 - RNA, 21 nt, Artificial Sequence
  siRNA antisense strand as evaluation subject
ugagaaacuccucgcugcggu

SEQ ID NO: 817546 - RNA, 21 nt, Artificial Sequence
  siRNA sense strand as evaluation subject
ggacggggaacgacaauuacc

SEQ ID NO: 817547 - RNA, 21 nt, Artificial Sequence
  siRNA antisense strand as evaluation subject
uaauugucguuccccguccua

SEQ ID NO: 817548 - RNA, 21 nt, Artificial Sequence
  siRNA sense strand as evaluation subject
cucggcugcucguaucuuacu

SEQ ID NO: 817549 - RNA, 21 nt, Artificial Sequence
  siRNA antisense strand as evaluation subject
uaagauacgagcagccgagac

SEQ ID NO: 817550 - RNA, 21 nt, Artificial Sequence
  siRNA sense strand as evaluation subject
gaggggaucaguauauacacu

SEQ ID NO: 817551 - RNA, 21 nt, Artificial Sequence
  siRNA antisense strand as evaluation subject
uguauauacugauccccucca

SEQ ID NO: 817552 - RNA, 21 nt, Artificial Sequence
  siRNA sense strand as evaluation subject
cucggcaacaucucuauguug

SEQ ID NO: 817553 - RNA, 21 nt, Artificial Sequence
  siRNA antisense strand as evaluation subject
acauagagauguugccgagaa

SEQ ID NO: 817554 - RNA, 21 nt, Artificial Sequence
  siRNA sense strand as evaluation subject
gcgaaacgauccucucaauca

SEQ ID NO: 817555 - RNA, 21 nt, Artificial Sequence
  siRNA antisense strand as evaluation subject
auugagaggaucguuucgcag

SEQ ID NO: 817556 - RNA, 21 nt, Artificial Sequence
  siRNA sense strand as evaluation subject
cacuacgagcaacgaauaaua

SEQ ID NO: 817557 - RNA, 21 nt, Artificial Sequence
  siRNA antisense strand as evaluation subject
uuauucguugcucguagugcc

SEQ ID NO: 817558 - RNA, 21 nt, Artificial Sequence
  siRNA sense strand as evaluation subject
cccccgaccgagaauagcagc

SEQ ID NO: 817559 - RNA, 21 nt, Artificial Sequence
  siRNA antisense strand as evaluation subject
ugcuauucucggucgggggag

SEQ ID NO: 817560 - RNA, 21 nt, Artificial Sequence
  siRNA sense strand as evaluation subject
caaccucgcuucauuguguau

SEQ ID NO: 817561 - RNA, 21 nt, Artificial Sequence
  siRNA antisense strand as evaluation subject
acacaaugaagcgagguuguc

SEQ ID NO: 817562 - RNA, 21 nt, Artificial Sequence
  siRNA sense strand as evaluation subject
ggaaguacgaggucacuuacc

SEQ ID NO: 817563 - RNA, 21 nt, Artificial Sequence
  siRNA antisense strand as evaluation subject
uaagugaccucguacuuccac

SEQ ID NO: 817564 - RNA, 21 nt, Artificial Sequence
  siRNA sense strand as evaluation subject
cagccauaccgauucuauugg

SEQ ID NO: 817565 - RNA, 21 nt, Artificial Sequence
  siRNA antisense strand as evaluation subject
aauagaaucgguauggcugaa

SEQ ID NO: 817566 - RNA, 21 nt, Artificial Sequence
  siRNA sense strand as evaluation subject
gggucguuacagcuaguauuu

SEQ ID NO: 817567 - RNA, 21 nt, Artificial Sequence
  siRNA antisense strand as evaluation subject
auacuagcuguaacgacccac

SEQ ID NO: 817568 - RNA, 21 nt, Artificial Sequence
  siRNA sense strand as evaluation subject
gcuucagcgcaguauauuacu

SEQ ID NO: 817569 - RNA, 21 nt, Artificial Sequence
  siRNA antisense strand as evaluation subject
uaauauacugcgcugaagcca

SEQ ID NO: 817570 - RNA, 21 nt, Artificial Sequence
  siRNA sense strand as evaluation subject
ccgugggcugaucaauaaagg

SEQ ID NO: 817571 - RNA, 21 nt, Artificial Sequence
  siRNA antisense strand as evaluation subject
uuuauugaucagcccacgggg

SEQ ID NO: 817572 - RNA, 21 nt, Artificial Sequence
  siRNA sense strand as evaluation subject
gcucgacgggauucucuaaaa

SEQ ID NO: 817573 - RNA, 21 nt, Artificial Sequence
  siRNA antisense strand as evaluation subject
uuagagaaucccgucgagcuc

SEQ ID NO: 817574 - RNA, 21 nt, Artificial Sequence
  siRNA sense strand as evaluation subject
cuaucccucacgauggaaauc

SEQ ID NO: 817575 - RNA, 21 nt, Artificial Sequence
  siRNA antisense strand as evaluation subject
uuuccaucgugagggauagga

SEQ ID NO: 817576 - RNA, 21 nt, Artificial Sequence
  siRNA sense strand as evaluation subject
gacguucggcuacuacuuaau

SEQ ID NO: 817577 - RNA, 21 nt, Artificial Sequence
  siRNA antisense strand as evaluation subject
uaaguaguagccgaacgucau

SEQ ID NO: 817578 - RNA, 21 nt, Artificial Sequence
  siRNA sense strand as evaluation subject
caaugucggacacuacuuuca

SEQ ID NO: 817579 - RNA, 21 nt, Artificial Sequence
  siRNA antisense strand as evaluation subject
aaaguaguguccgacauuguc

SEQ ID NO: 817580 - RNA, 21 nt, Artificial Sequence
  siRNA sense strand as evaluation subject
cgcucaguuacaacuagauga

SEQ ID NO: 817581 - RNA, 21 nt, Artificial Sequence
  siRNA antisense strand as evaluation subject
aucuaguuguaacugagcgaa

SEQ ID NO: 817582 - RNA, 21 nt, Artificial Sequence
  siRNA sense strand as evaluation subject
guggugaacuaacuaguauga

SEQ ID NO: 817583 - RNA, 21 nt, Artificial Sequence
  siRNA antisense strand as evaluation subject
auacuaguuaguucaccacca

SEQ ID NO: 817584 - RNA, 21 nt, Artificial Sequence
  siRNA sense strand as evaluation subject
ccgaugugcgcccauuguaac

SEQ ID NO: 817585 - RNA, 21 nt, Artificial Sequence
  siRNA antisense strand as evaluation subject
uacaaugggcgcacaucggag

SEQ ID NO: 817586 - RNA, 21 nt, Artificial Sequence
  siRNA sense strand as evaluation subject
caaucgaacguaaacaacaag

SEQ ID NO: 817587 - RNA, 21 nt, Artificial Sequence
  siRNA antisense strand as evaluation subject
uguuguuuacguucgauuguc

SEQ ID NO: 817588 - RNA, 21 nt, Artificial Sequence
  siRNA sense strand as evaluation subject
gacggggagaucagcauuugc

SEQ ID NO: 817589 - RNA, 21 nt, Artificial Sequence
  siRNA antisense strand as evaluation subject
aaaugcugaucuccccgucac

SEQ ID NO: 817590 - RNA, 21 nt, Artificial Sequence
  siRNA sense strand as evaluation subject
cauuucaaccgguuauggugc

SEQ ID NO: 817591 - RNA, 21 nt, Artificial Sequence
  siRNA antisense strand as evaluation subject
accauaaccgguugaaaugcc

SEQ ID NO: 817592 - RNA, 21 nt, Artificial Sequence
  siRNA sense strand as evaluation subject
cgccauaaggcauugaucagg

SEQ ID NO: 817593 - RNA, 21 nt, Artificial Sequence
  siRNA antisense strand as evaluation subject
ugaucaaugccuuauggcgag

SEQ ID NO: 817594 - RNA, 21 nt, Artificial Sequence
  siRNA sense strand as evaluation subject
ccuaccuauauagauucaacu

SEQ ID NO: 817595 - RNA, 21 nt, Artificial Sequence
  siRNA antisense strand as evaluation subject
uugaaucuauauagguaggaa

SEQ ID NO: 817596 - RNA, 21 nt, Artificial Sequence
  siRNA sense strand as evaluation subject
cucucguaugacuauugguca

SEQ ID NO: 817597 - RNA, 21 nt, Artificial Sequence
  siRNA antisense strand as evaluation subject
accaauagucauacgagaggg

SEQ ID NO: 817598 - RNA, 21 nt, Artificial Sequence
  siRNA sense strand as evaluation subject
gcgacaagaccguguacuucg

SEQ ID NO: 817599 - RNA, 21 nt, Artificial Sequence
  siRNA antisense strand as evaluation subject
aaguacacggucuugucgcac

SEQ ID NO: 817600 - RNA, 21 nt, Artificial Sequence
  siRNA sense strand as evaluation subject
cgauucggagggucuucaucg

SEQ ID NO: 817601 - RNA, 21 nt, Artificial Sequence
  siRNA antisense strand as evaluation subject
augaagacccuccgaaucgaa

SEQ ID NO: 817602 - RNA, 21 nt, Artificial Sequence
  siRNA sense strand as evaluation subject
cguaccggcucuggaaaaucc

SEQ ID NO: 817603 - RNA, 21 nt, Artificial Sequence
  siRNA antisense strand as evaluation subject
auuuuccagagccgguacguc

SEQ ID NO: 817604 - RNA, 21 nt, Artificial Sequence
  siRNA sense strand as evaluation subject
ggacggcuggacuaucacaag

SEQ ID NO: 817605 - RNA, 21 nt, Artificial Sequence
  siRNA antisense strand as evaluation subject
ugugauaguccagccguccca

SEQ ID NO: 817606 - RNA, 21 nt, Artificial Sequence
  siRNA sense strand as evaluation subject
caaagcgcuacucgauuaaca

SEQ ID NO: 817607 - RNA, 21 nt, Artificial Sequence
  siRNA antisense strand as evaluation subject
uuaaucgaguagcgcuuugaa

SEQ ID NO: 817608 - RNA, 21 nt, Artificial Sequence
  siRNA sense strand as evaluation subject
guugaaccgucuaacaacaga

SEQ ID NO: 817609 - RNA, 21 nt, Artificial Sequence
  siRNA antisense strand as evaluation subject
uguuguuagacgguucaaccu

SEQ ID NO: 817610 - RNA, 21 nt, Artificial Sequence
  siRNA sense strand as evaluation subject
ccuugcuacggcacauuguga

SEQ ID NO: 817611 - RNA, 21 nt, Artificial Sequence
  siRNA antisense strand as evaluation subject
acaaugugccguagcaaggcc

SEQ ID NO: 817612 - RNA, 21 nt, Artificial Sequence
  siRNA sense strand as evaluation subject
gcuaguugaggccuugaaugu

SEQ ID NO: 817613 - RNA, 21 nt, Artificial Sequence
  siRNA antisense strand as evaluation subject
auucaaggccucaacuagcag

SEQ ID NO: 817614 - RNA, 21 nt, Artificial Sequence
  siRNA sense strand as evaluation subject
ggauacagaauaauguacaag

SEQ ID NO: 817615 - RNA, 21 nt, Artificial Sequence
  siRNA antisense strand as evaluation subject
uguacauuauucuguauccac

SEQ ID NO: 817616 - RNA, 21 nt, Artificial Sequence
  siRNA sense strand as evaluation subject
gcaaugguggacuauccuuau

SEQ ID NO: 817617 - RNA, 21 nt, Artificial Sequence
  siRNA antisense strand as evaluation subject
aaggauaguccaccauugcca

SEQ ID NO: 817618 - RNA, 21 nt, Artificial Sequence
  siRNA sense strand as evaluation subject
ggcucgacucgaauuccaaag

SEQ ID NO: 817619 - RNA, 21 nt, Artificial Sequence
  siRNA antisense strand as evaluation subject
uuggaauucgagucgagccac

SEQ ID NO: 817620 - RNA, 21 nt, Artificial Sequence
  siRNA sense strand as evaluation subject
cauagcuaguaccuuguauga

SEQ ID NO: 817621 - RNA, 21 nt, Artificial Sequence
  siRNA antisense strand as evaluation subject
auacaagguacuagcuaugac

SEQ ID NO: 817622 - RNA, 21 nt, Artificial Sequence
  siRNA sense strand as evaluation subject
gcgugccggaacugugauuac

SEQ ID NO: 817623 - RNA, 21 nt, Artificial Sequence
  siRNA antisense strand as evaluation subject
aaucacaguuccggcacgcgu

SEQ ID NO: 817624 - RNA, 21 nt, Artificial Sequence
  siRNA sense strand as evaluation subject
gcuuucggguggccauaaaag

SEQ ID NO: 817625 - RNA, 21 nt, Artificial Sequence
  siRNA antisense strand as evaluation subject
uuuauggccacccgaaagcgc

SEQ ID NO: 817626 - RNA, 21 nt, Artificial Sequence
  siRNA sense strand as evaluation subject
ggguuggcacugcaugauauc

SEQ ID NO: 817627 - RNA, 21 nt, Artificial Sequence
  siRNA antisense strand as evaluation subject
uaucaugcagugccaaccccu

SEQ ID NO: 817628 - RNA, 21 nt, Artificial Sequence
  siRNA sense strand as evaluation subject
cuuccgcguucaaaaccaucu

SEQ ID NO: 817629 - RNA, 21 nt, Artificial Sequence
  siRNA antisense strand as evaluation subject
augguuuugaacgcggaaguc

SEQ ID NO: 817630 - RNA, 21 nt, Artificial Sequence
  siRNA sense strand as evaluation subject
cgugggaaugucuaacgaugg

SEQ ID NO: 817631 - RNA, 21 nt, Artificial Sequence
  siRNA antisense strand as evaluation subject
aucguuagacauucccacggc

SEQ ID NO: 817632 - RNA, 21 nt, Artificial Sequence
  siRNA sense strand as evaluation subject
gcgacgacuuugaugaugugg

SEQ ID NO: 817633 - RNA, 21 nt, Artificial Sequence
  siRNA antisense strand as evaluation subject
acaucaucaaagucgucgcca

SEQ ID NO: 817634 - RNA, 21 nt, Artificial Sequence
  siRNA sense strand as evaluation subject
cguuuugagcagaaaggauuc

SEQ ID NO: 817635 - RNA, 21 nt, Artificial Sequence
  siRNA antisense strand as evaluation subject
auccuuucugcucaaaacgcu

SEQ ID NO: 817636 - RNA, 21 nt, Artificial Sequence
  siRNA sense strand as evaluation subject
guccugaccuacucacuaugg

SEQ ID NO: 817637 - RNA, 21 nt, Artificial Sequence
  siRNA antisense strand as evaluation subject
auagugaguaggucaggacgg

SEQ ID NO: 817638 - RNA, 21 nt, Artificial Sequence
  siRNA sense strand as evaluation subject
ccggguuaaccgagagauagu

SEQ ID NO: 817639 - RNA, 21 nt, Artificial Sequence
  siRNA antisense strand as evaluation subject
uaucucucgguuaacccggaa

SEQ ID NO: 817640 - RNA, 21 nt, Artificial Sequence
  siRNA sense strand as evaluation subject
ccuucgcugaggacuuagucc

SEQ ID NO: 817641 - RNA, 21 nt, Artificial Sequence
  siRNA antisense strand as evaluation subject
acuaaguccucagcgaaggcc

SEQ ID NO: 817642 - RNA, 21 nt, Artificial Sequence
  siRNA sense strand as evaluation subject
gugcaucagccgugucuauuc

SEQ ID NO: 817643 - RNA, 21 nt, Artificial Sequence
  siRNA antisense strand as evaluation subject
auagacacggcugaugcacug

SEQ ID NO: 817644 - RNA, 21 nt, Artificial Sequence
  siRNA sense strand as evaluation subject
cgucgugucucaagaucuagc

SEQ ID NO: 817645 - RNA, 21 nt, Artificial Sequence
  siRNA antisense strand as evaluation subject
uagaucuugagacacgacgug

SEQ ID NO: 817646 - RNA, 21 nt, Artificial Sequence
  siRNA sense strand as evaluation subject
gcaaccgacgauucuucuacu

SEQ ID NO: 817647 - RNA, 21 nt, Artificial Sequence
  siRNA antisense strand as evaluation subject
uagaagaaucgucgguugcag

SEQ ID NO: 817648 - RNA, 21 nt, Artificial Sequence
  siRNA sense strand as evaluation subject
ggggcuggcuccgauguauuu

SEQ ID NO: 817649 - RNA, 21 nt, Artificial Sequence
  siRNA antisense strand as evaluation subject
auacaucggagccagccccuu

SEQ ID NO: 817650 - RNA, 21 nt, Artificial Sequence
  siRNA sense strand as evaluation subject
cagcagccugccgaguauugg

SEQ ID NO: 817651 - RNA, 21 nt, Artificial Sequence
  siRNA antisense strand as evaluation subject
aauacucggcaggcugcugug

SEQ ID NO: 817652 - DNA, 58 bp, Homo sapiens
gacacggacgtcaacaccctgacccgcttcgtcatggaggagggcaggaaggcccgcg

SEQ ID NO: 817653 - DNA, 58 bp, Mus musculus
gaaacggatatcagcaccctgacccgcttcgtcatggagcagggcaggaaggctcagg

SEQ ID NO: 817654 - RNA, 21 nt, Artificial Sequence
  Synthetic RNA targeted to Homo sapiens
cccugacccgcuucgucaugg

SEQ ID NO: 817655 - RNA, 21 nt, Artificial Sequence
  Synthetic RNA targeted to Homo sapiens
augacgaagcgggucagggug

SEQ ID NO: 817656 - DNA, 1017 bp, Homo sapiens
atggctgaccaggcgcccttcgacacggacgtcaacaccctgacccgcttcgtcatggaggagggcaggaaggcccgcggcacgggcgagttgacccagctgctcaactcgctctgcacagcagtcaaagccatctcttcggcggtgcgcaaggcgggcatcgcgcacctctatggcattgctggttctaccaacgtgacaggtgatcaagttaagaagctggacgtcctctccaacgacctggttatgaacatgttaaagtcatcctttgccacgtgtgttctcgtgtcagaagaagataaacacgccatcatagtggaaccggagaaaaggggtaaatatgtggtctgttttgatccccttgatggatcttccaacatcgattgccttgtgtccgttggaaccatttttggcatctatagaaagaaatcaactgatgagccttctgagaaggatgctctgcaaccaggccggaacctggtggcagccggctacgcactgtatggcagtgccaccatgctggtccttgccatggactgtggggtcaactgcttcatgctggacccggccatcggggagttcattttggtggacaaggatgtgaagataaaaaagaaaggtaaaatctacagccttaacgagggctacgccagggactttgaccctgccgtcactgagtacatccagaggaagaagttccccccagataattcagctccttatggggcccggtatgtgggctccatggtggctgatgttcatcgcactctggtctacggagggatatttctgtaccccgctaacaagaagagccccaatggaaagctgagactgctgtacgaatgcaaccccatggcctacgtcatggagaaggctgggggaatggccaccactgggaaggaggccgtgttagacgtcattcccacagacattcaccagagggcgccggtgatcttgggatcccccgacgacgtgctcgagttcctgaaggtgtatgagaagcactctgcccagtga

SEQ ID NO: 817657 - DNA, 1017 bp, Mus musculus
atggcgaaccatgcgcccttcgaaacggatatcagcaccctgacccgcttcgtcatggagcagggcaggaaggctcagggcacgggggagttgacccagctgctgaattcgctctgcaccgcgatcaaagccatctcgtctgcggtgcgccaggcgggcatcgcacagctctatggtatcgctggctcaaccaatgtgactggggatcaagtaaagaagctggacatactttccaatgacctggtgatcaatatgctgaagtcgtcctacgctacctgtgttcttgtgtctgaagaaaacacaaatgccatcataatcgaacctgagaagaggggcaaatatgttgtctgtttcgatccccttgatggctcatccaacattgactgccttgtgtccatcggaaccatttttggcatttacagaaagaaaagtactgatgagccttctgagaaggatgctctgcagcccggccgggacctggtggcagccgggtatgcgctctatggcagtgccaccatgttggtccttgccatggattgtggtgtcaactgcttcatgctggacccgtccattggagaattcattatggtggacagggacgtgaagatgaagaagaaaggtaacatctacagccttaatgagggttatgccaaggactttgaccctgccatcaatgagtatctccagaggaaaaagttccctccggatggttcagccccctatggtgcccggtatgtggggtccatggtggctgatattcaccgcactctggtatatggagggatctttttataccccgccaacaagaaaagcccaagtggaaagctgcggctgctgtatgagtgcaaccccatagcttatgtcatggagaaggccggtgggctcgccaccacgggggacaaagatatattagacatcgttcccaccgagatccaccagaaggcaccagtcgtcatggggtcctctgaagatgtgcaggagttcctggagatctacaggaagcacaaagccaagtga

SEQ ID NO: 817658 - DNA, 81 bp, Homo sapiens
atggaagacgccaaaaacataaagaaaggcccggcgccattctatccgctggaagatggaaccgctggagagcaactgcat

SEQ ID NO: 817659 - DNA, 67 bp, Homo sapiens
acacccgagggggatgataaaccgggcgcggtcggtaaagttgttccattttttgaagcgaaggttg

SEQ ID NO: 817660 - DNA, 48 bp, Homo sapiens
cgatgacgccggtgaacttcccgccgccgttgttgttttggagcacgg

SEQ ID NO: 817661 - RNA, 21 nt, Artificial Sequence
  Synthesized siRNA as evaluation subject
ccgggccgccgaacauccugc

SEQ ID NO: 817662 - RNA, 21 nt, Artificial Sequence
  Synthesized siRNA as evaluation subject
uuucauauugcugacguacgu

SEQ ID NO: 817663 - RNA, 21 nt, Artificial Sequence
  Synthesized siRNA as evaluation subject
ucuuccagcggauagaauggc

SEQ ID NO: 817664 - DNA, 10 bp, Artificial Sequence
  Synthetic example of a sequence in which 10 or more bases of guanine and/or cytosine are continuously present
gggggggggg

SEQ ID NO: 817665 - DNA, 10 bp, Artificial Sequence
  Synthetic example of a sequence in which 10 or more bases of guanine and/or cytosine are continuously present
cccccccccc

SEQ ID NO: 817666 - DNA, 10 bp, Artificial Sequence
  Synthetic example of a sequence in which 10 or more bases of guanine and/or cytosine are continuously present
gcggcccgcg

SEQ ID NO: 817667 - DNA, 23 bp, Homo sapiens
caccctgacccgcttcgtcatgg

SEQ ID NO: 817668 - DNA, 23 bp, Homo sapiens
gccttctgagaaggatgctctgc

SEQ ID NO: 817669 - RNA, 21 nt, Homo sapiens
cccugacccgcuucgucaugg

SEQ ID NO: 817670 - RNA, 21 nt, Homo sapiens
augacgaagcgggucagggug
